(19) United States
(12) Patent Application Publication
(10) Pub. No.: US 2007/0213274 A1
(43) Pub. Date: Sep. 13, 2007

(54) Novel genes and markers associated with high-density lipoprotein-cholesterol (HDL-C)

(75) Inventor: Jukka T. Salonen, Kuopio (FI)

Correspondence Address: BIRCH STEWART KOLASCH & BIRCH, PO BOX 747, FALLS CHURCH, VA, 22040-0747, US

(73) Assignee: Oy Jurilab Ltd, Kuopio (FI)

(21) Appl. No.: 11/640,897

(22) Filed: Dec. 19, 2006

Related U.S. Application Data
(60) Provisional application No. 60/751,624, filed on Dec. 20, 2005.

(51) Int. Cl. A61K 48/00; A61K 38/17; G06F 19/00; C12Q 1/68

(52) U.S. Cl. 514/12; 514/44; 435/6; 705/3

(57) ABSTRACT

This invention relates to the therapeutic, diagnostic and pharmacogenetic use of nucleic acids and proteins involved in the regulation of human high density lipoprotein (HDL) and pharmaceutical agents and other therapies affecting this. This invention discloses methods for the treatment and prevention of low HDL states and diseases to prevent cardiovascular diseases such as coronary heart disease (CHD), acute myocardial infarction (AMI), chronic CHD and cerebrovascular stroke and for selecting treatment in a subject and for selecting subjects for studies testing HDL elevating agents, as well as to transgenic animals.

### FIELD OF THE INVENTION

[0001] The present invention relates generally to the field of treatment and prevention of low high-density lipoprotein-cholesterol (HDL-C) states, as it provides novel methods for prevention and treatment of low HDL-C status. The invention also relates to the field of prevention and treatment of conditions characterised by low HDL-C, such as cardiovascular diseases (CVD), type 2 diabetes (MD), the metabolic syndrome (MBO) and obesity, via diagnosis and treatment of low HDL-C. In addition, the invention relates to methods for screening new chemical entities for elevating HDL.

[0002] Low HDL-C and Disease

[0003] There are several main classes of plasma transporters, which carry and enhance the exchange of lipids in the circulation and between plasma and cells. These include the chylomicrons (CM), the very low-density lipoproteins (VLDL), the intermediate lipoproteins (ILP), the low-density lipoproteins (LDL) and HDL. A number of others exist (lipoprotein a, subtypes of the main classes), though not routinely measured.

[0004] Low HDL-cholesterol (HDL-C), high LDL-C and high plasma triglycerides (Tg) embody a dyslipidemia, common for atherosclerosis, T2D, obesity and MBO.

[0005] HDL represents one of the main lipoprotein carriers of cholesterol. Low HDL-C levels characterize about 10% of the general population (Sampietro T et al, 2005). Furthermore, low HDL concentration represents the most frequent dyslipidemia in patients with coronary artery disease (CAD) (Sampietro T, et al, 2005).

[0006] Despite of the existence of a number of drugs successfully reducing LDL plasma availability, the following reduction of cardiovascular risk does not prove to be enough sufficient. A number of clinical studies have been aiming to determine whether aggressive lowering of LDL-C beyond the currently accepted guidelines would result in further reduction of cardiovascular events (Cannon C P, et al, 2004; Waters D D, et al,2004). The results from some of those studies are still pending, while others such as the PROVE IT-TIMI 22 (Cannon, C. P., et al., 2004) have shown certain benefits of aggressive lowering of LDL, which, however, leave remarkably high residual cardiovascular disease (CVD) occurrence.

[0007] HDL is an independent predictor of the risk of CHD or CAD (Castelli W P et al, 1986, Salonen J T et al, 1991). Already in 1977 it was shown that CAD patients have 35% lower HDL-C levels than controls and those with lowered HDL have been exposed to three times higher likelihood of developing CAD than those with elevated LDL-C (Miller N E et al, 1977). Low HDL-C was observed to be the most common lipid abnormality in men with coronary artery disease (Genest J J et al, 1991). According to the first large-scale prospective trial to study the effect of raising HDL-C on CAD incidence (the Helsinki Heart Study), 11% increase in HDL-C levels was independently associated with a 34% reduction in CAD events (Manninen V et al, 1992). A number of other clinical studies have confirmed a significantly reduced incidence of coronary events after an increase in HDL-C concentration (Alberti K G 1998; Frick M H et al, 1987; Rubins H B et al, 1999). Thus elevating the low HDL-C levels independently or in combination with a decreasing of the high LDL-C state represents a frontier in the treatment and prevention of CVD.

[0008] Besides characterising the dyslipidemia related to T2D, low HDL-C has been related to a higher conversion rate from impaired glucose tolerance (IGT) to T2D (Todorova B et al, 2004). Subjects with type 2 diabetes generally carry an array of risk factors for cardiovascular disease (CVD), including hyperglycaemia, dyslipidaemia (high Tg, high LDL-C and low HDLC), alterations in inflammatory mediators and coagulation/thrombolytic parameters, as well as other ‘non-traditional’ risk factors, many of which may be closely associated with insulin resistance (Erdmann E, 2005). Consequently, rates of CVD mortality and morbidity are particularly high in this population (Erdmann E, 2005). Targeting hyperglycaemia alone does not reduce the excess cardiovascular risk in diabetic patients, highlighting the need for aggressive treatment of other risk factors and in that sense the low HDL-C levels.

[0009] Not lastly, low HDL-C is one of the hallmarks of the metabolic/insulin resistance syndrome (MS, IRS, MBO)—a concurrence of disturbed glucose and insulin metabolism, overweight and abdominal fat distribution, mild dyslipidemia and hypertension. The syndrome is characterized by insulin resistance, and is also known as the insulin resistance syndrome. An elevation of the decreased HDL-C levels yet again implies for a rationale drug target in the prevention and treatment of MS.

[0010] Atheroprotective Effect of HDL

[0011] At a molecular level, atherosclerosis is a time dependent, multistep process involving the interaction of many different key pathways, including lipoprotein metabolism (Chisolm G M and D Steinberg, 2000), lipoprotein oxidation (Salonen J T et al, 1992), coagulation (Tremoli E et al, 1999) and inflammation (Ross R, 1999). Gene mutations in any of these pathways will only provide a partial contribution to risk. Intermediate phenotypes such as hypertension, diabetes, smoking and obesity interact to modulate risk as will do gene-gene and gene-environment interactions (Stephens J W and Humphries S E, 2003).

[0012] The atheroprotective role of HDL particles has been widely studied though still to be elucidated. A proposed mechanism leading to the formation of the foam cells and thus to the formation of the atherosclerotic plaque is the imbalance between the uptake of lipoproteins and cholesterol efflux from Mf (Linsel-Nitschke P and Tall A R, 2005). HDL mediated efflux of cholesterol from cholesterol loaded macrophages, other cells and LDL particles takes place in the following described RCT pathway. The lipid content of the LDL particles is known to be more prone to oxidation than the one in the HDL (Navab M et al, 2004). Furthermore, the LDL particles have the characteristic to remain longer in the subendothelial space compared to the HDLs.

[0013] HDL is considered to expand its protective role further than only in promoting the efflux of cholesterol from lipid-loaded cells. HDL particles show anti-inflammatory activity and are effective antioxidants via suppressing the induction of cell-adhesion molecules in endothelial cells, mediated by tumour necrosis factor α (TNFα) (Cockerill G W et al, 1995) and C-reactive protein (CRP) (Wadham C et al, 2004). Thus they have a role to lessen the recruitment of blood monocytes into the arterial wall. Further on, by means of the ApoA1 and ApoA2, which are known to have antioxidant characteristics, as well as via the cotransport of paraoxonase, HDL particles expand their antioxidant functions (Barter P J et al, 2004).

[0014] It has been shown that oxidized LDL (oxLDL) depletes caveolae of cholesterol, which on turn results in the displacement of endothelial nitric-oxide synthase (eNOS) from caveolae with impairement of the eNOS activation (Uittenbogaard A et al, 2000). HDL binding to the scavenger receptor BI (SR-BI) maintains the concentration of caveola-associated cholesterol by promoting the uptake of cholesterol esters, thereby preventing oxLDL-induced depletion of caveola cholesterol (Uittenbogaard A et al, 2000). Furthermore, HDL maintains the subcellular location of eNOS which decreases the capacity for eNOS activation (Uittenbogaard A et al, 2000). Additionally, HDL activates eNOS (Yuhanna I. S et al, 2001) and accounts for increased myocardial perfusion via NO-dependent mechanisms (Levkau B et al, 2004).

[0015] The Reverse Cholesterol Transport

[0016] Several aspects engage HDL particles as modulators of the formation and progression of the atherosclerotic plaque, the main of which involves the promotion of cholesterol efflux in the reverse cholesterol transport pathway (RCT). RCT on the other hand encompasses the main pathway of metabolism, regulation, transformation and degradation of the HDL particle.

[0017] The primary site for nascent HDL formation is liver, whereas peripheral tissues and liver both are involved in further lipidation of the HDL particles. Apolipoprotein A 1 (ApoA1) is the main structural component of the HDL particles. Secreted by the liver ApoA1 becomes associated with phospholipids and shapes the discoidal nascent pre-βHDL particle.

[0018] The initial step of the RCT is the transfer of cholesterol and phospholipids to the lipid-poor ApoA1. It is mediated by the membrane ATP-binding cassette transporter 1 (ABCA1) protein. ABCA1 belongs to the ATP-binding cassette transporter superfamily which is known to carry a large number of molecules, such as proteins, ions and lipids across plasma membranes. ABCA1 deficiency results in little or no plasma HDL in human or animals (Attie A D, 2001), while its overexpression has been related to increased cholesterol and phospholipid efflux, accompanied by increased HDL levels (Singaraja R R, et al, 2001; Vaisman B L et al, 2001).

[0019] The free cholesterol on the surface of the small pre-βHDL particles undergoes esterification in order to be stored in the core of the particles. In this process the small discoidal particle is transformed to a spherical and larger one. The cholesterol esterification is mediated by the lecithin cholesterol acyl transferase (LCAT). LCAT is an enzyme, secreted by the liver and circulating in blood. It binds reversibly to the surface of the HDL particles. The process of cholesterol esterification and accumulation of the cholesterol esters in the particle core promotes further cholesterol efflux from cells to the HDL particles. Thus LCAT plays a pivotal role in promoting of the cholesterol uptake from the lipid loaded cells (Wang, M. and M. R. Briggs, 2004).

[0020] The spherical and smaller HDL particle (HDL₃) becomes larger HDL₂ as it accepts more free cholesterol from cells. This stage of cholesterol transfer from cells to HDL₃ is mediated by the scavenger receptor B1 (SR-B1) or a passive diffusion, both distinct from the one mediated by the ABCA1 (Wang M and Briggs M R, 2004). The scavenger receptors are cell surface membrane proteins that bind chemically modified lipoproteins such as acetylated LDL and oxidised LDL (Krieger M, 1997). SR-B1 binds HDL particles with high affinity and represents a mediator of the selective cholesterol uptake. Furthermore, it is as well the HDL receptor responsible for the selective HDL uptake in the liver (Wang M and Briggs M R, 2004).

[0021] A central element in the RCT is the interaction between the LDL, VLDL and HDL particles and particularly the exchange of cholesterol esters, phospholipids and triglycerides. As a result the excess cholesterol is transported from the periphery to a metabolic disposal or recycling processes. The cholesterol ester transfer protein (CETP) mediates the exchange of lipids from the large HDL₂ and LDL particles to the VLDL particles (Wang M and Briggs M R, 2004). CETP is associated with the HDL particles in plasma and its activity is reversely correlated to the HDL-C levels. The phospholipids transfer protein (PLTP) is another transferring protein, which mediates the transport of lipids from the VLDL to the HDL₃ particles (Wang M and Briggs M R, 2004).

[0022] The degradation of large cholesterol-rich HDL₂ particles follows the cholesterol ester selective uptake, mediated by the SR-B1 (Wang M and Briggs M R, 2004). In the liver the cholesterol molecules are excreted via the bile or further utilized in body systems, while the ApoA1 is used in a new cycle of RCT.

[0023] An alternative way for HDL degradation is present in kidneys where the ApoA1 undergoes a renal clearance via interaction with a receptor, known as cubulin. Cubulin is expressed in a various number of tissues and shows a co-expression with megalin—a member of the LDL receptor family (Moestrup SK et al, 1998). Cubulin is a major ligand not only for ApoA1 but for HDL particles as well, as it efficiently mediates their endocytosis (Moestrup S K and Kozyraki R, 2000).

[0024] Necessary to be mentioned is a number of lipases, playing major roles in the HDL metabolism. The lipoprotein lipase (LPL) is bound to the surface of the endothelial cells and its activity correlates positively with the HDL concentration (Tornvall P et al, 1995). In the process of hydrolysing Tg rich lipoproteins (chylomicrons and VLDL), redundant surface lipids (free cholesterol and phospholipids) and apolipoproteins are transferred to HDL particles, contributing to the plasma HDL-C levels (Lewis G F and Rader D J, 2005).

[0025] The hepatic lipase (HL), another member of the lipases family, is situated on the surface of the sinusoidal capillaries in liver. In contrast to LPL, the HL has greater affinity to HDL particles than to VLDL or chylomicrons and converts larger HDL particles to smaller cholesterol-poor HDL remnants (Lewis G F and Rader D J, 2005). The endothelial lipase (EL) represents one more important HDL modulating lipase, which is located on the surface of the endothelium and is recognised to have a phospholipase A activity (Lewis G F and Rader D J, 2005).

[0026] Determinants of HDL

[0027] The main participants in the RCT pathway are the principal contributors to the HDL plasma levels. It has been shown that mutations in the genes encoding for ABCA1, LCAT, CETP, PLTP, HL, LPL, EL and SR-B1 have an impact on the HDL levels (Singaraja R R et al, 2001; Miltiadous G et al, 2005; Thompson J F et al, 2005; Cohen J C et al, 2004; Brousseau M E et al, 2004; Mank-Seymour A R et al, 2004; Morabia A et al, 2004). However, a number of other receptors, transporters and enzymes have influence on the HDL metabolism and plasma concentration. In that order, ABCG1 and ABCG4 have been reported to mediate the efflux of cellular cholesterol to mature HDL particles (but not to lipid poor ApoA1) (Wang N et al, 2004). Polymorphisms in the genes encoding for the ABCG5 and ABCG8 transporter proteins, which are related to the sitosterolemia (an inherited disorder, characterised by high absorption and low biliary secretion of cholesterol and plant sterols) have been associated with low HDL-C (Gylling H et al, 2004). To be mentioned further are members of the secretory phospholipase A2 family, which are plausibly relevant to the physiology of the HDL metabolism, by influencing the size and catabolism of the HDL particles (Tietge U J et al, 2002).

[0028] ApoA1 accounts for up to 70% of apolipoprotein content of HDL particles (Lewis G F and Rader D J, 2005; Davidson W S and Silva R A, 2005). ApoA1 exists in three main plasma forms (Davidson W S and Silva R A, 2005). Approximately 5-10% of plasma ApoA1 is found in a lipoprotein-unassociated state (Davidson W S and Silva R A, 2005). The other two forms of ApoA1 are coupled with the state of HDL reshaping, varying between discoidal and spherical. It has been postulated that ApoA1 responds to changes of the HDL diameter by folding or unfolding its so-called “hinge” domains (Davidson WS and Silva RA, 2005).

[0029] Since ApoA1 represents the main structural component of the HDL particles, the regulation of the ApoA1 gene expression, mutations and ApoA1 synthesis would have a significant implication on the HDL plasma concentration. Among the factors influencing the ApoA1 synthesis and metabolism are some hormones, such as thyroid hormones, estrogens and glucocorticoids (Hargrove G M et al, 1999). Furthermore, glucose and insulin (Mooradian A D, 2004), as well as cellular acidity (ketoacidosis) (Mooradian A D, 2004) and insulin resistance (Lopez-Candales A, 2001; Vajo Z et al., 2002) have shown to be associated with ApoA1 and HDL-C levels as well.

[0030] ApoA2 is the second most abundant apolipoprotein on HDL particles. A variety of other proteins such as ApoA4, ApoC1, ApoC3, ApoD, ApoE, ApoJ, ApoL1, ApoM and others contribute additionally to the HDL structure and thus modulate HDL plasma levels (Singaraja R R et al., 2001).

[0031] Among the non-genetic factors with a major influence on the HDL-C levels are age, gender, smoking (Nash D T, 2004), diet (Nash D T, 2004), alcohol consumption (Nash D T, 2004), exercise and physical activity (Nash D T, 2004). Also body composition, and specifically fat distribution (Pi-Sunyer F X, 2004), which are only in part genetivcally determined, have a major influence on HDL levels.

[0032] Obesity and particularly visceral obesity is associated with low HDL-C concentration (Pi-Sunyer F X, 2004). Adipose tissue and precisely the visceral adipocytes are metabolically very active, expressing various secretory proteins such as adiponectine, angiotensinogen, tumour necrosis factor-α (TNF-α), interleukins (ILs), plasminogen activator inhibitor type 1 and others. The free fatty acids (FFA), the TNFα and the IL-1β have been shown to alter the ApoA1 activation and expression and thus encompass an additional weight on the HDL-C levels (Haas M J et al, 2003).

[0033] Public Health Significance of CVD, T2D and MBO

[0034] Cardiovascular Diseases (CVD) (ICD/10 codes I00-I99, Q20-Q28) include ischemic (coronary) heart disease (CHD), hypertensive diseases, cerebrovascular disease (stroke) and rheumatic fever/rheumatic heart disease, among others (AHA, 2004). In terms of morbidity, mortality and cost CHD is the most important disease group of CVD. CHD (ICD/10 codes I20-I25) includes acute myocardial infarction (AMI), other acute ischemic (coronary) heart disease, angina pectoris; atherosclerotic cardiovascular disease and all other forms of chronic ischemic heart disease (AHA, 2004). Dyslipidemia (low HDL-C, high LDL-C and high FFA levels) is among the major CVD risk factors (Stamler J et al, 1998).

[0035] In 2001 an estimated 16.6 million—or one-third of total global deaths—resulted from the various forms of CVD (7.2 million due to CHD, 5.5 million to cerebrovascular disease, and an additional 3.9 million to hypertensive and other heart conditions). At least 20 million people survive heart attacks and strokes every year, a significant proportion of them requiring costly clinical care, which puts a huge burden on long-term care resources. It is necessary to recognize that CVD are devastating to men, women and children (ADA, 2004).

[0036] The term diabetes mellitus (DM) (ICD/10 codes E10-E14) describes several syndromes of abnormal carbohydrate metabolism that are characterized by hyperglycaemia. According to the new etiologic classification of DM, four categories are differentiated: type 1 diabetes (T1D), type 2 diabetes (T2D), other specific types, and gestational diabetes mellitus (ADA, 2003). In the United States, Canada, and Europe, over 80% of cases of diabetes are due to T2D, 5 to 10% to T1D, and the remainder to other specific causes. T2D is associated with a relative or absolute impairment in insulin secretion, along with varying degrees of peripheral resistance to the action of insulin. The chronic hyperglycaemia of diabetes is associated with long-term damage, dysfunction, and failure of various organs, especially the eyes, kidneys, nerves, heart, and blood vessels (ADA, 2003). T2D is characterized by adult onset insulin resistance and a rise in blood sugar concentration. In T1D, formerly known as insulin-dependent (IDDM), the pancreas fails to produce the insulin which is essential for survival. This form develops most frequently in children and adolescents, but is being increasingly diagnosed later in life. T2D, formerly named non-insulin-dependent (NIDDM), results from the body's inability to respond properly to the action of insulin produced by the pancreas. T-2D occurs most frequently in adults, but is being noted increasingly in adolescents as well (WHO, 2004). The causes of T2D are multi-factorial and include both genetic and environmental elements that affect beta cell function and tissue insulin sensitivity (muscle, liver, adipose tissue, pancreas). Although there is considerable debate as to the relative contributions of beta-cell dysfunction and reduced insulin sensitivity to the pathogenesis of diabetes, it is generally agreed that both of these factors play important roles (Scheen A J, 2003).

[0037] In 2000, there were approximately 171 million people, worldwide, with diabetes. The number of people with diabetes will expectedly double over the next 25 years and reach a total of 366 million by 2030 (WHO/IDF, 2004). Most of this increase will occur as a result of a 150% rise in developing countries. This suggests the role of relatively modern environmental or behavioural risk factors such as high caloric intake or sedentary lifestyle. However, ethnic differences in the incidence and prevalence of T2D and the enrichment of T2D in families suggest heritable risk factors to play a major role. The two main contributors to the worldwide increase in prevalence of diabetes are population ageing and urbanization, especially in developing countries, with the consequent increase in the prevalence of obesity (WRO/IDF, 2004). Currently more than 1 billion adults are overweight—and at least 300 million of them are clinically obese. Current obesity levels range from below 5% in China, Japan and certain African nations, to over 75% in urban Samoa. The prevalence of obesity is 10-25% in Western Europe and 20-27% in the Americas (WHO, 2004).

[0038] A distinct increase in the occurrence of MS has been observed worldwide in both adults and adolescence (Williams C L et al, 2002), and it is considered as an epidemic affecting not only the industrialized countries but the developing world as well.

[0039] To conclude, in a view of the pandemic spread of obesity, MBO, CVD and T2D, all in which low HDL-C has an important role, there is a lack of treatment models and medications focusing on the elevation of HDL-C. HDL levels are largely genetically determined, with results from different studies ranging from 24% to 83%, depending on different twin or family studies. A cluster of genetic and environmental factors has been assigned to the origin and development of CVD, T2D and MBO, lipid genetic determinants included. Thus, the discovery of genes regulating HDL metabolism and HDL plasma concentrations offers novel therapeutic strategies and targets in the management of the mentioned conditions.

### SUMMARY OF THE INVENTION

[0040] This invention relates to genes and biomarkers associated with low HDL-C levels and their use in the treatment and prevention of diseases and traits associated with low HDL-C levels. As ApoA1 is the major lipoprotein present in HDL particles the genes associated with ApoA1 levels (table 9.) are associated with HDL-C levels as well. Thus, the terms “HDL” and “HDL-C” are used in this patent to denote both high density lipoprotein and apolipoprotein AI. The present invention provides novel low HDL-C plasma level associated genes and individual SNP markers and combinations of SNP markers (haplotypes). The invention further relates to physiological and biochemical routes and pathways related to these genes. These pathways provide a basis for further research and development of CVD, T2D, MBO and obesity predisposition, diagnosis and treatment.

[0041] One major object of this invention is to provide novel methods for the treatment of low HDL-C by modifying the expression of HDL-C associated genes, by modifying the activity or function of proteins and polypeptides encoded by said genes, or by modifying the activity or function of endogenous and exogenous modulators of said low HDL-C associated genes, proteins or polypeptides in the human or animal subject. Yet another aspect of the invention is methods for the treatment of diseases and conditions related to low HDL-C concentration, i.e. CVD, T2D, MBO and obesity.

[0042] Another major object of this invention is to provide novel methods for the prevention of low HDL-C by modifying the expression of HDL-C associated genes, by modifying the activity or function of proteins and polypeptides encoded by said genes, or by modifying the activity or function of endogenous and exogenous modulators of said low HDL-C associated genes, proteins or polypeptides in the human or animal subject. Yet another aspect of the invention is methods for the prevention of diseases and conditions related to low HDL-C concentration, i.e. CVD, T2D, MBO and obesity.

[0043] Still another object of the invention is to provide methods for prediction of clinical course and monitoring the efficacy of treatments for low HDL-C using biomarkers related to the low HDL-C associated genes of this invention. Yet another object of the invention is methods to targeting HDL elevating, anti-CHD or anti-diabetic treatments in subjects having low HDL-C level associated disease of trait by determining the presence of mutations and sequence variations effecting expression of one or more genes set forth in tables 1, 8 and 9.

[0044] Another object of the invention is providing novel pathways to elucidate the presently unknown modes of action of known drugs with impact on HDL-C levels.

[0045] The invention also provides methods for screening compounds for the treatment of the low HDL-C level associated diseases and traits. A further object of the invention is to provide a method for the selection of experimental animals and human subjects for studies testing HDL elevating effects of drugs. A further object of the invention is methods of using non-human transgenic and gene knock-out animals for screening agents targeted to a gene set forth in tables 1 to 11 for the treatment or prevention of the low HDL-C level associated diseases and traits.

[0046] In summary, the invention helps meet the unmet medical needs and promotes public health in at least two major ways: 1) it provides novel means to prevent and treat low HDL-C levels and reduce the risk of an individual having low HDL-C level associated diseases such as CVD, T2D, MBO and obesity and 2) it provides drug and other therapeutic targets that can be used further to screen and develop therapeutic agents and therapies that can be used to increase low HDL-C levels and consequently to prevent CVD, T2D, MBO, obesity and other conditions related to low HDL-C before they manifest clinically; to prevent complications, to treat clinical symptoms and/or to retard the progression of said diseases and conditions.

### DETAILED DESCRIPTION OF THE INVENTION

[0047] The present invention discloses methods for the prevention and treatment of low HDL-C levels. Furthermore, it includes methods for prevention and treatment of diseases and clinical conditions related to low HDL-C, i.e. CVD, T2D, MBO and obesity in a human or animal. In the following, the word treating shall also be understood to include preventing. In the present invention, an individual who has or is at risk of low HDL-C is an individual who has a risk-increasing allele in at least one of the HDL-C-associated genes set forth in tables 1, 8 and 9. The term “gene” as used herein, refers to an entirety containing all regulatory elements located both upstream and downstream as well as within of a polypeptide encoding sequence, 5′ and 3′ untranslated regions of mRNA and the entire polypeptide encoding sequence including all exon and intron sequences (also alternatively spliced exons and introns) of a gene.

[0048] Low levels of HDL-C relate significantly and independently to increased occurrence of atherosclerosis, CVD, T2D and metabolic syndrome. An increase in low HDL-C levels has been shown indisputably to relate to improved CVD survival.

[0049] Atherosclerosis is a continuous inflammatory process of lipid deposition in the arterial wall and further oxidation of the deposited lipids. Higher delivery of LDL particles to the endothelial intima and their longer deposition there predisposes to increased accumulation of subendothelial lipids and higher probability for developing atherosclerotic plaque or increasing/unstabilizing an existent one. HDL particles antagonize the oxidation of LDLU and decrease the availability of LDL lipid content prone to oxidation. Thus, decrease in plasma HDL-C (by increased HDL excretion or decreased production for instance) results in poorer protection of the endothelium against oxidative action, excess of prone to oxidation LDL particles, and increased risk for atherosclerosis.

[0050] Besides antagonising LDL oxidation and subendothelial accumulation HDL particles hold other anti-atherogenic properties, expressed in the RCT, possess antioxidative characteristics, and neutralise the effect of inflammatory markers on the endothelial cells.

[0051] ApoA1 is a main structural component of HDL particles, and alteration in its plasma level will reflect HDL-C concentration.

[0052] Therefore, we propose that genetic defects that modulate or alter HDL-C levels is a general mechanism in the body of a mammalian subject, such as human, which contributes to the development of common degenerative diseases and related traits, such as cardiovascular and metabolic diseases, and traits predisposing to them. Identification of novel genes and pathways responsible for the regulation of HDL-C concentration enables the development of new methods for improving/increasing HDL-C levels, and thus offers novel methods to treat and prevent said common degenerative diseases.

[0053] The present invention relates to the genes and the encoded proteins or polypeptides regulating HDL metabolism, and endogenous and exogenous modulators of said genes, proteins or polypeptides.

[0054] Methods of Therapy

[0055] The invention discloses novel methods for the treatment and prevention of low HDL-C levels based on modulation of polypeptides and related metabolic pathways regulating HDL-C levels. The invention further proposes methods of prevention, follow-up and treatment of conditions related to low HDL-C levels, i.e. CVD, T2D, MBO and obesity.

[0056] The term, “treatment” as used herein, refers not only to ameliorating symptoms associated with the trait or disease, but also preventing or delaying the onset of the disease, and also lessening the severity or frequency of symptoms of the disease, preventing or delaying the occurrence of a second episode of the disease or condition; and/or also lessening the severity or frequency of symptoms of the disease or condition.

[0057] In particular, the invention relates to methods of treatment for low HDL-C trait or susceptibility to low HDL-C (for example, for individuals in an at-risk population such as those described herein); as well as to methods of treatment for manifestations of low HDL-C related conditions including but not limited to atherosclerosis, CVD, T2D, MBO and obesity.

[0058] The present invention encompasses methods of treatment (prophylactic and/or therapeutic) for low HDL-C, such as individuals in the target populations described herein, using a low HDL-C level increasing therapeutic agent. A “low HDL-C level increasing therapeutic agent” is an agent that alters (e.g., enhances or inhibits) biological activity, function or concentration of a low HDL-C level affecting polypeptide and/or biological activity or function of low HDL-C level associated metabolic pathway as described herein. Useful therapeutic agents can alter a HDL-C associated polypeptide biological activity or function by a variety of means, such as, for example, by altering translation rate of a HDL-C associated polypeptide encoding mRNA; by altering the transcription rate of the HDL-C associated gene; by altering posttranslational processing of a HDL-C associated polypeptide; by interfering with a HDL-C associated polypeptide activity and/or function (e.g., by binding to a HDL-C associated polypeptide); by altering stability of a HDL-C associated polypeptide; by altering the transcription rate of splice variants of a HDL-C associated gene or by inhibiting or enhancing the elimination of a HDL-C associated polypeptide from target cells, organs and/or tissues.

[0059] Representative low HDL-C therapeutic agents comprise the following: (a) nucleic acids, fragments, variants or derivatives of HDL-C associated genes described in this invention, nucleic acids encoding a HDL-C associated polypeptide or an active fragment or a derivative thereof and nucleic acids modifying the expression of said low HDL-C associated genes (e.g. antisense polynucleotides, catalytically active polynucleotides (e.g. ribozymes and DNAzymes), molecules inducing RNA interference (RNAi and micro RNA), and vectors comprising said nucleic acids; (b) HDL-C associated polypeptides, active fragments, variants or derivatives thereof, binding agents of HDL-C associated polypeptides; peptidomimetics; fusion proteins or prodrugs thereof, antibodies (e.g., an antibody to a mutant HDL-C associated polypeptide, or an antibody to a non-mutant HDL-C associated polypeptide, or an antibody to a particular variant encoded by a HDL-C associated gene, as described above) and other polypeptides (e.g., HDL-C associated receptors, active fragments, variants or derivatives thereof); (c) metabolites of HDL-C associated polypeptides or derivatives thereof; (d) small molecules and compounds that alter (e.g., inhibit or antagonize, or activate or agonize) a HDL-C associated gene expression, activity and/or function of a HDL-C associated gene encoded polypeptide, or activity and/or function of a HDL-C associated gene related metabolic pathway and; (e) small molecules and compounds that alter (e.g. induce or agonize, or activate or antagonize) a HDL-C associated gene expression, activity and/or function of a HDL-C associated gene encoded polypeptide, or activity and/or function of a low HDL-C associated gene related metabolic pathway.

[0060] More than one low HDL-C therapeutic agent can be used concurrently, if desired. The therapy is designed to alter (e.g., inhibit or enhance), replace or supplement activity and/or function of a low HDL-C associated polypeptide or related metabolic pathway in an individual. For example, a low HDL-C therapeutic agent can be administered in order to upregulate or increase the expression or availability of a HDL-C associated gene or a specific variant of a HDL-C associated gene or, conversely, to downregulate or decrease the expression or availability of a HDL-C associated gene or a specific variant of a HDL-C associated gene. Upregulation or increasing expression or availability of a native HDL-C associated gene or a particular variant of a HDL-C associated gene could interfere with or compensate for the expression or activity of a defective gene or variant; downregulation or decreasing expression or availability of a native HDL-C associated gene or a particular splicing variant of a HDL-C associated gene could minimize the expression or activity of a defective gene or the particular variant and thereby minimize the impact of the defective gene or the particular variant.

[0061] The HDL-C increasing agent(s) are administered in a therapeutically effective amount (i.e., an amount that is sufficient to treat the low HDL-C trait or condition, such as by ameliorating symptoms associated with the low HDL-C trait or condition, preventing or delaying the onset of the low HDL-C trait or condition, and/or also lessening the severity or frequency of symptoms of the low HDL-C trait or condition). The amount which will be therapeutically effective in the treatment of a particular individual's disorder or condition will depend on the symptoms and severity of the low HDL-C trait or condition, and can be determined by standard clinical techniques. In addition, in vitro or in vivo assays may optionally be employed to help identify optimal dosage ranges. The precise dose to be employed in the formulation will also depend on the route of administration, and the seriousness of the trait or condition, and should be decided according to the judgment of a practitioner and each patient's circumstances. Effective doses may be extrapolated from dose-response curves derived from in vitro or animal model test systems.

[0062] In one embodiment, a nucleic acid of the invention (e.g., a nucleic acid encoding a HDL-C associated polypeptide, fragment, variant or derivative thereof), either by itself or included within a vector, can be introduced into cells of an individual affected by a low HDL-C using variety of experimental methods described in the art, so that the treated cells start to produce native HDL-C associated polypeptide. Thus, cells which, in nature, lack of a native HDL-C associated gene expression and activity, or have abnormal HDL-C associated gene expression and activity, can be engineered to express same HDL-C associated polypeptide or an active fragment or a different variant of said HDL-C associated polypeptide. Genetic engineering of cells may be done either “ex vivo” (i.e. suitable cells are isolated and purified from a patient and re-infused back to the patient after genetic engineering) or “in vivo” (i.e. genetic engineering is done directly to a tissue of a patient using a vehicle).

[0063] Alternatively, in another embodiment of the invention, a nucleic acid of the invention; a nucleic acid complementary to a nucleic acid of the invention; or a portion of such a nucleic acid (e.g., a polynucleotide), can be used in “antisense” therapy, in which a nucleic acid (e.g., a polynucleotide) which specifically hybridizes to the mRNA and/or genomic DNA of a HDL-C associated gene is administered in a pharmaceutical composition to the target cells or said nucleic acid is generated “in vivo”. The antisense nucleic acid that specifically hybridizes to the mRNA and/or DNA inhibits expression of the HDL-C associated polypeptide, e.g., by inhibiting translation and/or transcription. Binding of the antisense nucleic acid can be due to conventional base pairing, or, for example, in the case of binding to DNA duplexes, through specific interaction in the major groove of the double helix.

[0064] In a preferred embodiment nucleic acid therapeutic agents of the invention are delivered into cells that express a low HDL-C associated gene. A number of methods including, but not limited to, the methods known in the art can be used for delivering a nucleic acid to said cells. For example, a vector can be introduced in vivo such that it is taken up by a cell and directs the transcription of a RNA molecule, which induces RNA interference in the cell. Such a vector can remain episomal or become chromosomally integrated, and as long as it can be transcribed to produce the desired RNA molecules it will modify the expression of a HDL-C associated gene. Such vectors can be constructed by various recombinant DNA technology methods standard in the art.

[0065] The expression of an endogenous HDL-C associated gene can be also reduced by inactivating or “knocking out” a HDL-C associated gene or its promoter using targeted homologous recombination methods described in the art. Alternatively, expression of a functional, non-mutant HDL-C associated gene can be increased using a similar method: targeted homologous recombination can be used to replace a non-functional HDL-C associated gene with a functional form of the said gene in a cell.

[0066] In yet another embodiment of the invention, other low HDL-C therapeutic agents as described herein can also be used in the treatment or prevention of low HDL-C trait or condition. The therapeutic agents can be delivered in a pharmaceutical composition they can be administered systemically, or can be targeted to a particular tissue. The therapeutic agents can be produced by a variety of means, including chemical synthesis, cell culture and recombinant techniques (e.g. with transgenic cells and animals). Therapeutic agents can be isolated and purified to fulfil pharmaceutical requirements using standard methods described in the art.

[0067] A combination of any of the above methods of treatment (e.g., administration of non-mutant HDL-C associated polypeptide in conjunction with RNA molecules inducing RNA interference targeted to the mutant HDL-C associated mRNA) can also be used.

[0068] In the case of pharmaceutical therapy, the invention comprises compounds, which modulate the activity, function or concentration of one or more polypeptides encoded by HDL-C associated genes. The treatment may also enhance or reduce the expression of one or more genes selected from HDL-C associated genes set forth in tables 1, 8 and 9.

[0069] In another embodiment of the invention, pharmaceutical therapy of the invention comprises compounds, which enhance or reduce the activity and/or function of biological networks and/or metabolic pathways related to polypeptides encoded by HDL-C associated genes set forth in tables 1, 8 and 9. The treatment may also enhance or reduce the expression of one or several genes in biological networks and/or metabolic pathways related to said HDL-C associated genes set forth in tables 1, 8 and 9.

[0070] Furthermore, a disclosed method or a test based on HDL-C associated gene specific markers (e.g. polymorphic sites, expression or polypeptides) is useful in selecting drug therapy for patients with low HDL-C trait, and can be further used in the treatment of low HDL-C related diseases such as CVD, T2D, MBO and obesity. A gene test recognizing the low HDL-C associated allele homozygocity or carrier status of HDL-C associated genes set forth in tables 2 to 7 and 10 to 11 is useful in selecting prophylactic treatment for individuals having a high risk of a low HDL-C trait or condition.

[0071] Yet in another embodiment of the invention, a test or a method based on low HDL-C level associated gene specific biomarkers (e.g. polymorphic sites, expression products, polypeptides or metabolites) is useful in selecting subjects testing treatments for low HDL-C trait and/or conditions, such as CVD, T2D, MBO and obesity.

[0072] A test or a method of this invention based on low HDL-C level associated gene specific biomarkers (e.g. polymorphic sites, expression products, polypeptides or metabolites) is useful in selecting drug therapy for patients who might be at increased risk for adverse effects of drugs affecting HDL-C metabolism.

[0073] Pharmaceutical Compositions

[0074] The present invention also pertains to pharmaceutical compositions comprising agents described herein, particularly polynucleotides, polypeptides and any fractions, variants or derivatives of HDL-C associated genes set forth in tables 1, 8 and 9, and/or agents that alter (e.g., enhance or inhibit) expression of low HDL-C level associated gene or genes, or activity of one or more polypeptides encoded by HDL-C associated gene or genes as described herein. For instance, an agent that alters expression of HDL-C associated genes, or activity of one or more polypeptides encoded by low HDL-C associated genes or a low HDL-C associated polypeptide binding agent, binding partner, fragment, fusion protein or prodrug thereof, or polynucleotides of the present invention, can be formulated with a physiologically acceptable carrier or excipient to prepare a pharmaceutical composition. The carrier and composition can be sterile. The formulation should suit the mode of administration.

[0075] In a preferred embodiment pharmaceutical compositions comprise agent or agents reversing, at least partially, low HDL-C level associated changes in biological networks and/or metabolic pathways related to the HDL-C associated genes of this invention.

[0076] Suitable pharmaceutically acceptable carriers include but are not limited to water, salt solutions (e.g., NaCl), saline, buffered saline, alcohols, glycerol, ethanol, gum arabic, vegetable oils, benzyl alcohols, polyethylene glycols, gelatin, carbohydrates such as lactose, amylose or starch, dextrose, magnesium stearate, talc, silicic acid, viscous paraffin, perfume oil, fatty acid esters, hydroxymethylcellulose, polyvinyl pyrolidone, etc., as well as combinations thereof. The pharmaceutical preparations can, if desired, be mixed with auxiliary agents, e.g., lubricants, preservatives, stabilizers, wetting agents, emulsifiers, salts for influencing osmotic pressure, buffers, coloring, flavoring and/or aromatic substances and the like which do not deleteriously react with the active agents.

[0077] The composition, if desired, can also contain minor amounts of wetting or emulsifying agents, or pH buffering agents. The composition can be a liquid solution, suspension, emulsion, tablet, pill, capsule, sustained release formulation, or powder. The composition can be formulated as a suppository, with traditional binders and carriers such as triglycerides. Oral formulation can include standard carriers such as pharmaceutical grades of mannitol, lactose, starch, magnesium stearate, polyvinyl pyrolidone, sodium saccharine, cellulose, magnesium carbonate, etc.

[0078] Methods of introduction of these compositions include, but are not limited to, intradermal, intramuscular, intraperitoneal, intraocular, intravenous, subcutaneous, topical, oral and intranasal. Other suitable methods of introduction can also include gene therapy (as described below), rechargeable or biodegradable devices, particle acceleration devises (“gene guns”) and slow release polymeric devices. The pharmaceutical compositions of this invention can also be administered as part of a combinatorial therapy with other agents.

[0079] The composition can be formulated in accordance with the routine procedures as a pharmaceutical composition adapted for administration to human beings. For example, compositions for intravenous administration typically are solutions in sterile isotonic aqueous buffer. Where necessary, the composition may also include a solubilizing agent and a local anesthetic to ease pain at the site of the injection. Generally, the ingredients are supplied either separately or mixed together in unit dosage form, for example, as a dry lyophilized powder or water free concentrate in a hermetically sealed container such as an ampule or sachette indicating the quantity of active agent. Where the composition is to be administered by infusion, it can be dispensed with an infusion bottle containing sterile pharmaceutical grade water, saline or dextrose/water. Where the composition is administered by injection, an ampule of sterile water for injection or saline can be provided so that the ingredients may be mixed prior to administration.

[0080] For topical application, nonsprayable forms, viscous to semi-solid or solid forms comprising a carrier compatible with topical application and having a dynamic viscosity preferably greater than water, can be employed. Suitable formulations include but are not limited to solutions, suspensions, emulsions, creams, ointments, powders, enemas, lotions, sols, liniments, salves, aerosols, etc., which are, if desired, sterilized or mixed with auxiliary agents, e.g., preservatives, stabilizers, wetting agents, buffers or salts for influencing osmotic pressure, etc. The agent may be incorporated into a cosmetic formulation. For topical application, also suitable are sprayable aerosol preparations wherein the active ingredient, preferably in combination with a solid or liquid inert carrier material, is packaged in a squeeze bottle or in admixture with a pressurized volatile, normally gaseous propellant, e.g., pressurized air.

[0081] Agents described herein can be formulated as neutral or salt forms. Pharmaceutically acceptable salts include those formed with free amino groups such as those derived from hydrochloric, phosphoric, acetic, oxalic, tartaric acids, etc., and those formed with free carboxyl groups such as those derived from sodium, potassium, ammonium, calcium, ferric hydroxides, isopropylamine, triethylamine, 2-ethylamino ethanol, histidine, procaine, etc.

[0082] The agents are administered in a therapeutically effective amount. The amount of agents which will be therapeutically effective in the treatment of a particular disorder or condition will depend on the nature of the disorder or condition, and can be determined by standard clinical techniques. In addition, in vitro or in vivo assays may optionally be employed to help identify optimal dosage ranges. The precise dose to be employed in the formulation will also depend on the route of administration, and the seriousness of the symptoms of cardiovascular/metabolic disease, and should be decided according to the judgment of a practitioner and each patient's circumstances. Effective doses may be extrapolated from dose-response curves derived from in vitro or animal model test systems.

[0083] At-Risk Alleles and At-Risk Haplotypes

[0084] The genetic markers listed in tables 2 to 7 and 10 to 11 of this invention are particular “alleles” at “polymorphic sites” associated with low HDL-C (or low ApoA1). A nucleotide position, at which more than one sequence is possible in a population, is referred to herein as a “polymorphic site”. Where a polymorphic site is a single nucleotide in length, the site is referred to as a SNP. For example, if at a particular chromosomal location, one member of a population has an adenine and another member of the population has a thymine at the same position, then this position is a polymorphic site, and, more specifically, the polymorphic site is a SNP. Polymorphic sites may be several nucleotides in length due to insertions, deletions, conversions or translocations. Each version of the sequence with respect to the polymorphic site is referred to herein as an “allele” of the polymorphic site. Thus, in the previous example, the SNP allows for both an adenine allele and a thymine allele.

[0085] Typically, a reference nucleotide sequence is referred to for a particular gene. Alleles that differ from the reference are referred to as “variant” alleles. The polypeptide encoded by the reference nucleotide sequence is the “reference” polypeptide with a particular reference amino acid sequence, and polypeptides encoded by variant alleles are referred to as “variant” polypeptides with variant amino acid sequences.

[0086] Nucleotide sequence variants can result in changes affecting properties of a polypeptide. These sequence differences, when compared to a reference nucleotide sequence, include insertions, deletions, conversions and substitutions: e.g. an insertion, a deletion or a conversion may result in a frame shift generating an altered polypeptide; a substitution of at least one nucleotide may result in a premature stop codon, amino acid change or abnormal mRNA splicing; the deletion of several nucleotides, resulting in a deletion of one or more amino acids encoded by the nucleotides; the insertion of several nucleotides, such as by unequal recombination or gene conversion, resulting in an interruption of the coding sequence of a reading frame; duplication of all or a part of a sequence; transposition; or a rearrangement of a nucleotide sequence, as described in detail above. Such sequence changes alter the polypeptide encoded by a low HDL-C level associated gene described in this invention. For example, a nucleotide change resulting in a change in polypeptide sequence can alter the physiological properties of a polypeptide dramatically by resulting in altered activity, distribution and stability or otherwise affect on properties of a polypeptide.

[0087] Alternatively, nucleotide sequence variants can result in changes affecting transcription of a gene or translation of its mRNA. A polymorphic site located in a regulatory region of a gene may result in altered transcription of a gene e.g. due to altered tissue specificity, altered transcription rate or altered response to transcription factors. A polymorphic site located in a region corresponding to the mRNA of a gene may result in altered translation of the mRNA e.g. by inducing stable secondary structures to the mRNA and affecting the stability of the mRNA. Such sequence changes may alter the expression of a low HDL-C level associated gene of this invention.

[0088] A “haplotype”, as described herein, refers to any combination of genetic markers (“alleles”), such as those set forth in tables 4 and 7. A haplotype can comprise two or more alleles.

[0089] As it is recognized by those skilled in the art the same haplotype can be described differently by determining alleles from different strands e.g. the haplotype rs1872393, rs779744, rs779742, and rs3804900 (A A C C) is the same as haplotype rs1872393, rs779744, rs779742, and rs3804900 (T T G G) in which the alleles are determined from the other strand or haplotype rs1872393, rs779744, rs779742, and rs3804900 (T A C C), in which the first allele is determined from the other strand.

[0090] It is understood that the low HDL-C level associated alleles and haplotypes described in this invention may be associated with other “polymorphic sites” located in HDL-C associated genes of this invention. These other HDL-C associated polymorphic sites may be either equally useful as genetic markers or even more useful as causative variations explaining the observed association of at-risk alleles and at-risk haplotypes of this invention to low HDL-C.

[0091] In certain methods described herein, an individual who is at risk for low HDL-C is an individual in whom an at-risk allele or an at-risk haplotype is identified. In one embodiment, the at-risk allele or the at-risk haplotype is one that confers a significant risk of low HDL-C. In one embodiment, significance associated with an allele or a haplotype is measured by an odds ratio. In a further embodiment, the significance is measured by a percentage. In one embodiment, a significant risk is measured as odds ratio of at least about 1.2, including by not limited to: 0.1, 0.2, 0.3, 0.4, 0.5, 0.6, 0.7, 0.8, 0.9, 1.2, 1.3, 1.4, 1.5, 1.6, 1.7, 1.8, 1.9, 2.0, 2.5, 3.0, 4.0, 5.0, 10.0, 15.0, 20.0, 25.0, 30.0 and 40.0. In a further embodiment, a significant increase or reduction in risk is at least about 20%, including but not limited to about 25%, 30%, 35%, 40%, 45%, 50%, 55%, 60%, 65%, 70%, 75%, 80%, 85%, 90%, 95% and 98%. In a further embodiment, a significant increase in risk is at least about 50%. It is understood however, that identifying whether a risk is medically significant may also depend on a variety of factors, including the specific disease, the allele or the haplotype, and often, environmental factors.

[0092] An at-risk haplotype in, or comprising portions of, the low HDL-C associated gene, is one where the haplotype is more frequently present in an individual at risk for low HDL-C (affected), compared to the frequency of its presence in a healthy individual (control), and wherein the presence of the haplotype is indicative of low HDL-C or susceptibility to low HDL-C.

[0093] Primers, Probes and Nucleic Acid Molecules

[0094] “Probes” or “primers” are oligonucleotides that hybridize in a base-specific manner to a complementary strand of nucleic acid molecules. By “base specific manner” is meant that the two sequences must have a degree of nucleotide complementarity sufficient for the primer or probe to hybridize. Accordingly, the primer or probe sequence is not required to be perfectly complementary to the sequence of the template. Non-complementary bases or modified bases can be interspersed into the primer or probe, provided that base substitutions do not inhibit hybridization. The nucleic acid template may also include “non-specific priming sequences” or “nonspecific sequences” to which the primer or probe has varying degrees of complementarity. Such probes and primers include polypeptide nucleic acids (Nielsen P E et al, 1991).

[0095] A probe or a primer comprises a region of nucleic acid that hybridizes to at least about 15, for example about 20-25, and in certain embodiments about 40, 50 or 75, consecutive nucleotides of a nucleic acid of the invention, such as a nucleic acid comprising a contiguous nucleic acid sequence.

[0096] In preferred embodiments, a probe or primer comprises 100 or fewer nucleotides, in certain embodiments, from 6 to 50 nucleotides, for example, from 12 to 30 nucleotides. In other embodiments, the probe or primer is at least 70% identical to the contiguous nucleic acid sequence or to the complement of the contiguous nucleotide sequence, for example, at least 80% identical, in certain embodiments at least 90% identical, and in other embodiments at least 95% identical, or even capable of selectively hybridizing to the contiguous nucleic acid sequence or to the complement of the contiguous nucleotide sequence. Often, the probe or primer further comprises a label, e.g., radioisotope, fluorescent compound, enzyme, or enzyme co-factor.

[0097] Antisense nucleic acid molecules of the invention can be designed using the nucleotide sequences of low HDL-C level associated genes and/or their complementary sequences and constructed using chemical synthesis and enzymatic ligation reactions using procedures known in the art. For example, an antisense nucleic acid molecule (e.g., an antisense oligonucleotide) can be chemically synthesized using naturally occurring nucleotides or variously modified nucleotides designed to increase the biological stability of the molecules or to increase the physical stability of the duplex formed between the antisense and sense nucleic acids, e.g., phosphorothioate derivatives and acridine substituted nucleotides can be used. Alternatively, the antisense nucleic acid molecule can be produced biologically using an expression vector into which a nucleic acid molecule encoding a HDL-C related gene, a fragment or a variant thereof has been cloned in antisense orientation (i.e., RNA transcribed from the expression vector will be complementary to the transcribed RNA of a cardiovascular/metabolic diseases risk gene of interest).

[0098] Portions or fragments of the nucleotide sequences identified herein (and the corresponding complete gene sequences) can be used in numerous ways as polynucleotide reagents. For example, these sequences can be used to: (i) map their respective genes on a chromosome; and, thus, locate gene regions associated with genetic disease; (ii) identify an individual from a minute biological sample (tissue typing); and (iii) aid in forensic identification of a biological sample. Additionally, the nucleotide sequences of the invention can be used to identify and express recombinant polypeptides for analysis, characterization or therapeutic use, or as markers for tissues in which the corresponding polypeptide is expressed, either constitutively, during tissue differentiation, or in diseased states. The nucleic acid sequences can additionally be used as reagents in the screening and/or diagnostic assays described herein, and can also be included as components of kits (e.g., reagent kits) for use in the screening and/or diagnostic assays described herein.

[0099] Polyclonal and Monoclonal Antibodies

[0100] The invention comprises polyclonal and monoclonal antibodies that bind to polypeptides of the invention. The term “antibody” as used herein refers to immunoglobulin molecules and immunologically active portions of immunoglobulin molecules, i.e., molecules that contain a binding site that specifically binds to an epitope (antigen, antigenic determinant). An antibody molecule that specifically binds to a polypeptide of the invention is a molecule that binds to an epitope present in said polypeptide or a fragment thereof, but does not substantially bind other molecules in a sample, e.g., a biological sample, which naturally contains the polypeptide. Examples of immunologically active portions of immunoglobulin molecules include F(ab) and F(ab′).sub.2 fragments which can be generated by treating the antibody with an enzyme such as pepsin. Polyclonal and/or monoclonal antibodies that specifically bind one form of the gene product but not to the other form of the gene product are also provided. Antibodies are also provided, that bind a portion of either the variant or the reference gene product that contains the polymorphic site or sites. The term “monoclonal antibody” or “monoclonal antibody composition”, as used herein refers to a population of antibody molecules that are directed against a specific epitope and are produced either by a single clone of B cells or a single hybridoma cell line. A monoclonal antibody composition thus typically displays a single binding affinity for a particular polypeptide of the invention with which it immunoreacts.

[0101] Polyclonal antibodies can be prepared as known by those skilled in the art by immunizing a suitable subject with a desired immunogen, e.g., polypeptide of the invention or fragment thereof. The antibody titer in the immunized subject can be monitored over time by standard techniques, such as with an enzyme linked immunosorbent assay (ELISA) using immobilized polypeptide. If desired, the antibody molecules directed against the polypeptide can be isolated from the mammal (e.g., from the blood) and further purified by well-known techniques, such as protein A chromatography to obtain the IgG fraction. At an appropriate time after immunization, e.g., when the antibody titers are highest, antibody-producing cells can be obtained from the subject and used to prepare monoclonal antibodies by standard techniques, such as the hybridoma technique (Kohler G and Milstein C, 1975), the human B cell hybridoma technique (Kozbor D, 1982), the EBV-hybridoma technique (Cole S P et al, 1984), or trioma techniques (Hering S et al, 1988). To produce a hybridoma an immortal cell line (typically a myeloma) is fused to lymphocytes (typically splenocytes) from a mammal immunized with an immunogen as described above, and the culture supernatants of the resulting hybridoma cells are screened to identify a hybridoma producing a monoclonal antibody that binds a polypeptide of the invention.

[0102] Any of the many well known protocols used for fusing lymphocytes and immortalized cell lines can be applied for the purpose of generating a monoclonal antibody to a polypeptide of the invention (Bierer B et al, 2002). Moreover, the ordinarily skilled worker will appreciate that there are many variations of such methods that also would be useful. Alternative to preparing monoclonal antibody-secreting hybridomas, a monoclonal antibody to a polypeptide of the invention can be identified and isolated by screening a recombinant combinatorial immunoglobulin library (e.g., an antibody phage display library) with the polypeptide to thereby isolate immunoglobulin library members that bind the polypeptide (Hay B N 1992; Hayashi N et al, 1995; Griffiths A D et al, 1993; Huse W D et al, 1989). Kits for generating and screening phage display libraries are commercially available.

[0103] Additionally, recombinant antibodies, such as chimeric and humanized monoclonal antibodies, comprising both human and non-human portions, which can be made using standard recombinant DNA techniques, are within the scope of the invention. Such chimeric and humanized monoclonal antibodies can be produced by recombinant DNA techniques known in the art.

[0104] In general, antibodies of the invention (e.g., a monoclonal antibody) can be used to isolate a polypeptide of the invention by standard techniques, such as affinity chromatography or immunoprecipitation. An antibody specific for a polypeptide of the invention can facilitate the purification of a native polypeptide of the invention from biological materials, as well as the purification of recombinant form of a polypeptide of the invention from cultured cells (culture media or cells). Moreover, an antibody specific for a polypeptide of the invention can be used to detect the polypeptide (e.g., in a cellular lysate, cell supernatant, or tissue sample) in order to evaluate the abundance and pattern of expression of the polypeptide. Antibodies can be used diagnostically to monitor protein levels in tissue such as blood as part of a test predicting the susceptibility to cardiovascular/metabolic diseases or as part of a clinical testing procedure, e.g., to, for example, determine the efficacy of a given treatment regimen. Antibodies can be coupled to various enzymes, prosthetic groups, fluorescent materials, luminescent materials, bioluminescent materials, and radioactive materials to enhance detection. Examples of suitable enzymes include horseradish peroxidase, alkaline phosphatase, beta-galactosidase, or acetylcholinesterase; examples of suitable prosthetic group complexes include streptavidin/biotin and avidin/biotin; examples of suitable fluorescent materials include umbelliferone, fluorescein, fluorescein isothiocyanate, rhodamine, dichlorotriazinylamine fluorescein, dansyl chloride or phycoerythrin; an example of a luminescent material includes luminol; examples of bioluminescent materials include luciferase, luciferin, and aequorin, and examples of suitable radioactive material include .sup.125I, 131I, 35S or 3H.

[0105] Diagnostic and Screening Assays

[0106] The probes, primers and antibodies described herein can be used in methods of selecting efficient and safe therapy for increasing HDL-C levels of a subject. For example biomarkers associated to the low HDL-C level associated genes of this invention can be assessed from a subject and therapy can be focused to genes having altered activity.

[0107] Determination of the nucleotides present in one or more of the low HDL-C associated SNP markers of this invention, as well as polymorphic sites associated with low HDL-C associated SNP markers of this invention, in an individual's nucleic acid can be done by any method or technique which can accurately determine nucleotides present in a polymorphic site. Numerous suitable methods have been described in the art (Kwok P Y, 2001; Syvanen A C, 2001), these methods include, but are not limited to, hybridization assays, ligation assays, primer extension assays, enzymatic cleavage assays, chemical cleavage assays and any combinations of these assays. The assays may or may not include PCR, solid phase step, a microarray, modified oligonucleotides, labeled probes or labeled nucleotides and the assay may be multiplex or singleplex. As it is obvious in the art the nucleotides present in a polymorphic site can be determined from either nucleic acid strand or from both strands.

[0108] Diagnostically the most useful polymorphic sites are those altering the polypeptide biological activity, function or concentration of a low HDL-C associated gene due to a frame shift; due to a premature stop codon, due to an amino acid change or due to abnormal mRNA splicing. Nucleotide changes resulting in a change in polypeptide sequence in many cases alter the physiological properties of a polypeptide by resulting in altered activity, distribution and stability or otherwise affect on properties of a polypeptide. Other diagnostically useful polymorphic sites are those affecting transcription of a low HDL-C associated genes or translation of it's mRNA due to altered tissue specificity, due to altered transcription rate, due to altered response to physiological status, due to altered translation efficiency of the mRNA and due to altered stability of the mRNA. Alterations in transcription can be assessed by a variety of methods described in the art, including e.g. hybridization methods, enzymatic cleavage assays, RT-PCR assays and microarrays. A test sample from an individual is collected and the alterations in the transcription of low HDL-C associated genes are assessed from the RNA present in the sample.

[0109] A test sample from an individual may be assessed for presence of alterations in the biological activity, function, concentration and/or structure of polypeptides encoded by low HDL-C associated genes set forth in tables 1, 8 and 9 by various methods known in the art e.g. by assays based on chromatography, spectroscopy, colorimetry, electrophoresis, isoelectric focusing, specific cleavage, immunologic techniques and measurement of biological activity as well as combinations of different assays. An “alteration” as used herein, refers to an alteration in expression or composition of a polypeptide of the test sample, as compared with the expression or composition in a control sample. A control sample is a sample that corresponds to the test sample (e.g., is from the same type of cells), and is from an individual who is not affected by low HDL-C.

[0110] Western blotting analysis, using an antibody as described above that specifically binds to a polypeptide encoded by a mutant HDL-C associated gene or an antibody that specifically binds to a polypeptide encoded by a non-mutant gene, or an antibody that specifically binds to a particular splicing variant encoded by a HDL-C associated gene can be used to identify the presence or absence in a test sample of a particular polypeptide encoded by a polymorphic or mutant HDL-C associated gene.

[0111] Methods of selecting efficient and safe therapy of this invention may further comprise a step of combining information concerning age, gender, the family history of low HDL-C, as well as CVD, diabetes and hypercholesterolemia or/and a medical history for those, and the medical history concerning HDL-C, smoking status, and waist-to-hip circumference ratio (cm/cm) of the subject. The detection method of the invention may also further comprise a step determining blood, serum or plasma cholesterol, HDL cholesterol, LDL cholesterol, triglyceride, ApoA1 and apolipoprotein B, fibrinogen, ferritin, transferrin receptor, C-reactive protein, serum or plasma insulin concentration.

### EXAMPLE 1

### KIHD Cohort Genotyping Study

[0112] Study Design

[0113] This invention is based on whole-genome association study approach, in which distributions or means of the phenotypic measurement (HDL and ApoAI) are compared across genotypes or patterns of genetic markers. The study subjects were a subset of a population-based study in East Finland, the KIHD (Salonen 1988). This work is based on 246 male participants in the KIHD study.

[0114] Study Population

[0115] The subjects were participants of the Kuopio Ischaemic Heart Disease Risk Factor Study (KIHD), which is an ongoing prospective population-based study designed to investigate risk factors for chronic diseases, including AMI, CHD, HT, stroke, T2D, MBO and obesity, among middle-aged men from East Finland. The study population was a random age-stratified sample of men living in Eastern Finland who were 42, 48, 54 or 60 years old at baseline examinations in 1984-1989. A total of 2682 men were examined in the baseline examinations during 1984-89. Data used here concerning serum HDL and apolipoprotein Al concentrations are from measurements at this baseline examination. The recruitment and examination of the subjects has been described previously in detail (Salonen J T 1988, WO02074230, WO03089638). The University of Kuopio and Kuopio University Hospital Ethics Committee approved the study. All participants gave their written informed consent. For this study, 246 male KIHD baseline participants and four female KIHD 11-year examination participants were selected.

[0116] The Measurement of HDL and Apolipoprotein AI

[0117] HDL fractions were separated from fresh serum by combined ultracentrifugation and precipitation (Salonen et al 1991, W003052129). The cholesterol contents of lipoprotein fractions and serum triglycerides were measured enzymatically. The mean HDL-C was 1.29 mmol/L, minimum 0.76 mmol/L, maximum 2.77 mmol/L and standard deviation 0.30 mmol/L.

[0118] Serum apolipoprotein AI concentrations were measured for 241 male subjects as described previously (Salonen et al 1992). The mean ApoAI was 1.33 mg/L, minimum 0.85 mg/L, maximum 2.50 mg/L and the SD 0.25 mg/L.

[0119] Genomic DNA Isolation and Quality Testing

[0120] High molecular weight genomic DNA samples were extracted from frozen venous whole blood using standard methods and dissolved in standard TE buffer. The quantity and purity of each DNA sample was evaluated by measuring the absorbance at 260 and 280 nm and integrity of isolated DNA samples were evaluated with 0,9% agarose gel electrophoresis and Ethidiumbromide staining. A sample was qualified for genome wide scan (GWS) analysis if A260/A280 ratio was ≧1.7 and average size of isolated DNA was over 20 kb in agarose gel electrophoresis. Before GWS analysis samples were diluted to concentration of 50 ng/μl in reduced EDTA TE buffer (TEKnova).

[0121] Genome-Wide Scan

[0122] Genotyping of SNP markers was performed by using the technology access version of Affymetrix GeneChip® human mapping 100k system. The assay consisted of two arrays, Xba and Hind, which were used to genotype over 126,000 SNP markers from each DNA sample. The assays were performed according to the instructions provided by the manufacturer. A total of 250 ng of genomic DNA was used for each individual assay. DNA sample was digested with either Xba I or Hind III enzyme (New England Biolabs, NEB) in the mixture of NE Buffer 2 (1×; NEB), bovine serum albumin (1×; NEB), and either Xba I or Hind III (0,5 U/μl; NEB) for 2 h at +37° C. followed by enzyme inactivation for 20 min at +70° C. Xba I or Hind III adapters were then ligated to the digested DNA samples by adding Xba or Hind III adapter (0,25 μM, Affymetrix), T4 DNA ligase buffer (1×; NEB), and T4 DNA ligase (250 U; NEB). Ligation reactions were allowed to proceed for 2 h at +16° C. followed by 20 min incubation at +70° C. Each ligated DNA sample was diluted with 75 μl of molecular biology-grade water (BioWhittaker Molecular Applications/Cambrex).

[0123] Diluted ligated DNA samples were subjected to four identical 100 μl volume polymerase chain reactions (PCR) by implementing a 10 μl aliquot of DNA sample with Pfx Amplification Buffer (1×; Invitrogen), PCR Enhancer (1×; Invitrogen), MgSO₄ (1 mM; Invitrogen), dNTP (300 μM each; Takara), PCR primer (1 μM; Affymetrix), and Pfx Polymerase (0,05 U/μl; Invitrogen). The PCR was allowed to proceed for 3 min at +94° C., followed by 30 cycles of 15 sec at +94° C., 30 sec at +60° C., 60 sec at +68° C., and finally for the final extension for 7 min at +68° C. The performance of the PCR was checked by standard 2% agarose gel electrophoresis in 1×TBE buffer for 1 h at 120V.

[0124] PCR products were purified according to Affymetrix manual using MinElute 96 UF PCR Purification kit (Qiagen) by combining all four PCR products of an individual sample into same purification reaction. The purified PCR products were eluted with 40 μl of EB buffer (Qiagen), and the yields of the products were measured at the absorbance 260 nm. A total of 40 μg of each PCR product was then subjected to fragmentation reaction consisting of 0,2 U/μl fragmentation reagent (Affymetrix) in 1×Fragmentation Buffer. Fragmentation reaction was allowed to proceed for 35 min at +37° C. followed by 15 min incubation at +95° C. for enzyme inactivation. Completeness of fragmentation was checked by running an aliquot of each fragmented PCR product in 4% agarose 1×TBE (BMA Reliant precast) for 30-45 min at 120V.

[0125] Fragmented PCR products were then labeled using 1×Terminal Deoxinucleotidyl Transferase (TdT) buffer (Affymetrix), GeneChip DNA Labeling Reagent (0,214 mM; Affymetrix), and TdT (1,5 U/μl; Affymetrix) for 2 h at +37° C. followed by 15 min at +95° C. Labeled DNA samples were combined with hybridization buffer consisting of 0,056 M MES solution (Sigma), 5% DMSO (Sigma), 2,5×Denhardt's solution (Sigma), 5,77 mM EDTA (Ambion), 0,115 mg/ml Herring Sperm DNA (Promega), 1×Oligonucleotide Control reagent (Affymetrix), 11,5 μg/ml Human Cot-1 (Invitrogen), 0,0115% Tween-20 (Pierce), and 2,69 M Tetramethyl Ammonium Chloride (Sigma). DNA-hybridization buffer mix was denatured for 10 min at +95° C., cooled on ice for 10 sec and incubated for 2 min at +48° C. prior to hybridization onto corresponding Xba or Hind GeneChip® array. Hybridization was completed at +48° C. for 16-18 h at 60 rpm in an Affymetrix GeneChip Hybridization Oven. Following hybridization, the arrays were stained and washed in GeneChip Fluidics Station 450 according to fluidics station protocol Mapping10Kv1_{—}450 as recommended by the manufacturer. Arrays were scanned with GeneChip 3000 Scanner and the genotype calls for each of the SNP markers on the array were generated using Affymetrix Genotyping Tools (GTT) software. The confidence score in SNP calling algorithm was adjusted to 0.20.

[0126] Initial SNP Selection for Statistical Analysis

[0127] Prior to the statistical analysis, SNP quality was assessed on the basis of three values: the call rate (CR), minor allele frequency (MAF), and Hardy-Weinberg equilibrium (H-W). The CR is the proportion of samples with successful genotyping result. It does not take into account whether the genotypes are correct or not. The call rate was calculated as: CR=number of samples with successful genotype call/total number of samples. The MAF is the frequency of the allele that is less frequent in the study sample. MAF was calculated as: MAF=min(p, q), where p is frequency of the SNP allele ‘A’ and q is frequency of the SNP allele ‘B’; p=(number of samples with “AA”-genotype+0.5*number of samples with “AB”-genotype)/total number of samples with successful genotype call; q=1−p. SNPs that are homozygous (MAF=0) can not be used in genetic analysis and were thus discarded. H-W equilibrium is tested for controls. The test is based on the standard Chi-square test of goodness of fit. The observed genotype distribution is compared with the expected genotype distribution under H-W equilibrium. For two alleles this distribution is p2, 2pq, and q2 for genotypes ‘AA’, ‘AB’ and ‘BB’, respectively. If the SNP is not in H-W equilibrium it can be due to genotyping error or some unknown population dynamics (e.g. random drift, selection). Only the SNPs that had CR>50%, MAF>1%, and were in H-W equilibrium (Chi-square test statistic<23.93) were used in the statistical analysis.

[0128] Statistical Methods

[0129] Single SNP Analysis

[0130] For each SNP, differences in the mean HDL-C and ApoA1 levels for two allele groups were tested with t-test. Similarly differences in the mean HDL-C and ApoA1 levels for each genotype group were tested with one-way analysis of variance (ANOVA, F-test). For t-test either equal (ttest1) or unequal (ttest2) variances were assumed. Tests that gave P-value less than 0.005 were considered statistically significant.

[0131] Haplotype Region Analysis: HaploRec+HPMQ

[0132] The data set was analyzed with a haplotype pattern mining algorithm HPMQ software that is based on the HPM software (Toivonen H T et al, 2000). For HPMQ software genotypes must have phase known i.e. to determine which alleles are coming from the mother and which from the father. Without family data phases must be estimated based on population data. We used the HaploRec-program (Eronen L et al, 2004) to estimate the phases. HPMQ is very fast and can handle a large number of SNPs in a single run

[0133] For phase-known data HPMQ finds all haplotype patterns that are in concordance with the phase configuration. The length of the haplotype patterns can vary. As an example, if there are four SNPs and an individual has alleles A T for the SNP1, C C for the SNP2, C G for the SNP3, and A C for the SNP4 then HPMQ considers haplotype patterns that are in concordance with estimated phase (done by HaploRec). If the estimated phase is ACGA (from the mother/father) and TCCC (from the father/mother) then HPMQ considers two patterns (of length 4 SNPs): ACGA and TCCC. For each haplotype pattern, a Z-test statistic is computed based on the difference in the mean value of a continuous trait between a group that has the haplotype pattern and the group that does not have the haplotype pattern. A SNP is scored based on the number of times it is included in a haplotype pattern that passes the threshold value set for the Z-test. Significance of the score values is tested based on permutation tests.

[0134] Several parameters can be modified in the HPMQ program including the Z-test threshold value (-x), the maximum haplotype pattern length (-l), the maximum number of wildcards that can be included in a haplotype pattern (-w), and the number of permutation test in order to estimate the P-value (-p). Wildcards allow gaps in haplotypes. HPMQ was run with the following parameter settings: haplotype analysis with 5 SNPs (-x4-l5-w1-p10000). Haplotype genomic regions that gave P-value less than 0.005 were considered statistically significant.

[0135] Multivariate Analyses

[0136] Partial associations of SNPs with HDL-C and ApoAI, adjusted for all independent variables entering the model, were estimated by using the least squares regression analysis. SPSS for Windows 13.0 software was used.

[0137] Definition of Terms used in the Haplotype Analysis Results

[0138] The term “haplotype genomic region” or “haplotype region” refers to a genomic region that has been found significant in the haplotype analysis (HPMQ or similar statistical method/program). The haplotype region in this patent is defined as a sub-region of the pre-selected genomic region where for any SNP the permutated P-value is less or equal than 0.005.

[0139] Findings of the KIHD Cohort Study

[0140] Tables 2, 3 and 4 show the SNP markers with the strongest association with serum HDL-C concentration. SNP physical position is according to NCBI Human Genome Build 35.1. Gene locus is as reported by NCBI dbSNP database build 124.

[0141] Table 2 presents results from t-tests, in which equal variances between groups are assumed and p value is less than 0.005. The genes with intragenic markers with the strongest associations with serum HDL-C were ANGPT1, EFHA1, UNC13C, TULP4, ARFRP2, FLJ10099, CNNM2, DOK5L, SGCG, SNAP25, ZFPM2, SERPINA5, 13CDNA73, PHACTR1, NT5C2, DGKB, LOC283553, LTBP1, and MSR1.

[0142] In table 3 results from F-test (one-way ANOVA test) are summarized. P value of less than 0.005 is the significance limit.

[0143] Table 4 presents the most significant haplotype regions associated with HDL-C level based on HaploRec+HPMQ analysis. The strongest genes with an association with HDL-C P of less than 0.0005 were ANGPT1, HNRPD, LOC391672, CNGB3, MAPK8, LOC399763, LOC442115, GRIM1, ABCD3 AND SGCG.

[0144] Tables 5, 6, and 7 present corresponding results for SNP markers with the strongest association with serum ApoA1 levels. SNP physical position is according to NCBI Human Genome Build 35.1. Gene locus is as reported by NCBI dbSNP database build 124.

[0145] Table 5 presents results from t-tests, in which equal variances between groups are assumed and p value is less than 0.005.

[0146] In table 6 results from F-test (one-way ANOVA test) are summarized. P value of less than 0.005 is the significance limit.

[0147] Table 7 shows the most significant haplotype regions for ApoA1 based on HaploRec+HPM analysis.

[0148] Table 8 lists all genes, which were associated with HDL-C level in the pointwise and haplotype analyses (Tables 2, 3 and 4). Gene names are according to HUGO Gene Nomenclature Committee (HGNC).

[0149] Table 9 lists all genes, which were associated with ApoA1 level in pointwise and haplotype analyses (Tables 5, 6 and 7). Gene names are according to HUGO Gene Nomenclature Committee (HGNC).

[0150] Table 10 shows a linear regression model of the best HDL-C level predictive SNPs and genes.

[0151] Table 11 presents a linear regression model of the best ApoA1 level predictive SNPs and genes.

### EXAMPLE 2

### Low HDL-C Gene Replication Study

[0152] The replication study was based on HDL-C and genotype data of Jurilab's type 2 diabetes studies (SOHFA, GEDINO and DiaGen studies).

[0153] East Finnish (EF) Study Subjects

[0154] The study subjects (201 T2D cases and 200 healthy T2D-free controls) were participants of the SOHFA and GEDINO studies. SOHFA is a contractual study, in which the University of Kuopio is the contractee. “GEDINO” (Genetics of type 2 diabetes in North Savo) is a similar contractual project, in which the T2D cases and controls were collected by using a newspaper advertisement.

[0155] The cases had T2D and family history of T2D. All T2D cases (probands) had at least one additional affected relative, who was a parent, sibling or offspring of the proband. Most of them had more than one additional affected family member. The controls had neither T2D nor family history of T2D. The fasting blood glucose of the controls was 5.5 mmol/L or less and the glycated hemoglobin 5.5% or less.

[0156] Age and tobacco smoking were recorded on a self-administered questionnaire checked by an interviewer. HDL fractions were separated from fresh serum by combined ultracentrifugation and precipitation. The cholesterol contents of lipoprotein fractions and serum triglycerides were measured enzymatically. Both systolic and diastolic BPs were measured in the morning by a nurse with a mercury sphygmomanometer. The measuring protocol included three measurements in standing position with 5-minute intervals. The mean of all three measurements were used as SBP and DBP. Body mass index (BM) was computed as the ratio of weight to the square of height (kg/m²). Waist-to-hip ratio (WHR) was calculated as the ratio of waist circumference (average of one measure taken after inspiration and one taken after expiration at the midpoint between the lowest rib and the iliac crest) to hip circumference (measured at the level of the trochanter major).

[0157] The mean age of the cases was 64 years and that of the controls 67 years. Some cases had very low blood glucose, since they had hypoglycemic medication. In spite of this, the average blood glucose and glycated hemoglobin of the cases were higher than that of the controls. Since there was no matching according to obesity, the cases were on the average more obese than the controls.

[0158] Ashkenazi Jewish (AJ) Study Subjects

[0159] Subjects included in the study were collected in Israel by the physicians in charge in specialized clinics. Subjects were diagnosed with Type II Diabetes Mellitus according to the etiologic classification of Diabetes Mellitus proposed by the International Expert Committee under the sponsorship of the American Diabetes Association on May 1997. We included in the study 200 subjects (82 males and 118 females, mean age 64), each with 3 or more blood relatives of second degree or closer, suffering from T2D.

[0160] Matching 200 healthy control subjects (82 males and 118 females, mean age 74) were collected from the Israeli blood bank and elderly patients visiting general practitioners clinics. All subjects were of Ashkenazi Jewish origin. The study was approved by the appropriate ethics committees and participants had signed informed consent forms.

[0161] German (GE) and English (UK) Study Subjects

[0162] In Germany, cases were sampled from T2D patients from the Hospital of Diabetes and Metabolic Diseases (Karlsburg, Germany) and the diabetes dispensary unit of the Department of Endocrinology of the Ernst-Moritz-Arndt University (Greifswald, Germany). The controls were sampled from the non-diabetic examinees of the population based SHIP study cohort (Luedemann et al 2002). Total of 49 cases (24 females and 25 males) and 50 matched healthy controls (24 females and 26 males) from Germany were included in the study.

[0163] From England total of 50 cases (31 females and 19 males) and 50 matched healthy controls (31 females and 19 males) were included in the study. The controls were selected from the examinees of the Age and Cognitive Performance Research Centres (ACPRC) volunteer panel, a group of over 6000 older adults who have been previously described in detail (Rabbitt et al, 2004). A cohort of approximately 2000 of these individuals has DNA archived in the Dyne-Steel DNA bank. A group of 456 of these volunteers, residents of Greater Manchester, had previously taken part in a research study in 2001 which included medical history, including that of Diabetes Mellitus, and measurement of HbA_{1C}. From the original cohort of 456, a sample of 50 individuals was identified to sex match diabetic cases from Manchester. Each individual had an HbA_{1C} below 5.5% and at telephone interview of family diabetes mellitus history in 2006, reported no evidence of diabetes mellitus in parents or siblings. The University of Manchester research ethics committee approved the study and each individual completed an individual form of consent.

[0164] Study Subjects used to Replicate Low HDL-C Level Associated Genes

[0165] The replication was based on combined data set with 401 participants from the East Finland population, 98 participants from the German population and 85 participants from the UK population and using HDL as a quantitative trait. In addition to quantitative trait analysis, HDL was also categorized into two classes: normal: HDL>1.55 mmol/l and low: HDL<0.9 mmol/l. The combined data set of 292 participants included 145 participants from EF, 56 participants from Ashkenazi Jew population from Israel, 50 participants from GE, and 41 participants from UK.

[0166] Genotyping with Illumina's Sentrix HumanHap300

[0167] DNA isolation of cases and controls were done as described in example 1. The whole-genome genotyping of the DNA samples was performed by using Illumina's Sentrix HumanHap300 BeadChips and Infinium II genotyping assay. The HumanHap300 BeadChip contained over 317,000 tag SNPs markers derived from the International HapMap Project. TagSNPs are loci that can serve as proxies for many other SNPs. The use of tagSNPs greatly improves the power of association studies as only a subset of loci needs to be genotyped while maintaining the same information and power as if one had genotyped a larger number of SNPs.

[0168] The Infinium II genotyping with the HumanHap300 BeadChipassays was performed according to the “Single-Sample BeadChip Manual process” described in detail in “Infinium™ II Assay System Manual” provided by Illumina (San Diego, Calif., USA). Briefly, 750 ng of genomic DNA from a sample was subjected to whole-genome amplification. The amplified DNA was fragmented, precipitated and resuspended to hybridization buffer. The resuspended sample was heat denatured and then applied to one Sentrix HumanHap300 beadchip. After overnight hybridization mis- and non-hybridized DNA was washed away from the BeadChip and allele-specific single-base extension of the oligos on the BeadChip was performed in a Tecan GenePaint rack, using labeled deoxynucleotides and the captured DNA as a template. After staining of the extended DNA, the BeadChips were washed and scanned with the BeadArray Reader (Illumina) and genotypes from samples were called by using the BeadStudio software (Illumina).

[0169] Statistical Analyses

[0170] HDL as a quantitative trait was analysed from combined data set of 401 participants from the East Finland population, 98 participants from the German population and 85 participants from the UK population. The data set was analyzed with the R-programming language using a linear model of lm(z˜w+r+t+P), where for one individual z is a HDL measurement, w is a genotype, r is a T2D status, t is a gender, and P is indicating the population the individual is originating (either 1=EF, 2=AJ, 3=GE, 4=UK). Three different genotypic models were tested: an additive model where w can have three values e.g. 0=AA, 1=AG and 2=GG; a dominance model where w can have two values e.g. 0=AA, 1=AG or GG; and a recessive model where w can have two values e.g. 0=AA or AG and 1=GG.

[0171] In addition to quantitative trait analysis, HDL was also categorized into two classes: normal: HDL>1.55 mmol/l and low: HDL<0.9 mmol/l. The combined data set of 292 participants included 145 participants from EF, 56 participants from Ashkenazi Jew population (AJ) from Israel, 50 participants from GE, and 41 participants from UK. The statistical model used in the R-programming language was glm(z˜w+r+t+P,family=binomial(link=logit)), where z, w, r, t, and P are as above.

[0172] Replicating HDL-C Associated Genes

[0173] The HDL-C level associated genes which were discovered in Example 1 (fisted in Table 8.) and which replicated in combined SOHFA, GEDINO and DiaGen study data set are presented in table 1.

TABLE 1
List of genes that were first found with a data set of
246 male participants in the KIHD study and replicated with a
combined data set of 401 participants from the East Finland (EF)
population, 98 participants from the German (GE) population and
85 participants from the UK (UK) population and using HDL as a
quantitative trait or using a classified trait (class 1: HDL > 1.55
mmol/l, class 2: HDL < 0.9 mmol/l) and a combined data set of
292 paticipants: EF (145 participants), Ashkenazi Jews from Israel
(56 participants), GE (50 participants), and UK (41 participants).

| Gene | Gene_id | Chr | P-value1 | P-value2 |
|---|---|---|---|---|
| DLG2 | 1740 | 11 | 7.85E−04 | 7.39E−06 |
| SLC9A9 | 285195 | 3 | 3.45E−03 | 9.32E−06 |
| LRRN6C | 158038 | 9 | 3.36E−03 | 2.60E−05 |
| AMPH | 273 | 7 | 1.48E−03 | 5.15E−05 |
| CACNA1E | 777 | 1 | 7.09E−04 | 5.87E−05 |
| BCL2 | 596 | 18 | 2.06E−03 | 6.01E−05 |
| FMN2 | 56776 | 1 | 1.32E−03 | 7.80E−05 |
| GALNTL4 | 374378 | 11 | 1.38E−02 | 9.13E−05 |
| CSMD1 | 64478 | 8 | 2.07E−03 | 1.10E−04 |
| DMD | 1756 | X | 2.91E−04 | 1.18E−04 |
| PRKG1 | 5592 | 10 | 6.15E−04 | 1.56E−04 |
| HSPC117 | 51493 | 22 | 3.02E−03 | 1.57E−04 |
| AAA1 | 404744 | 7 | 1.41E−03 | 1.86E−04 |
| TEC | 7006 | 4 | 3.55E−03 | 2.21E−04 |
| CDH13 | 1012 | 16 | 4.17E−03 | 2.33E−04 |
| WWOX | 51741 | 16 | 4.03E−03 | 2.41E−04 |
| ANK3 | 288 | 10 | 1.15E−03 | 2.43E−04 |
| TMEFF2 | 23671 | 2 | 3.76E−03 | 2.60E−04 |
| TMCC2 | 9911 | 1 | 1.41E−02 | 2.76E−04 |
| CUBN | 8029 | 10 | 8.77E−04 | 2.77E−04 |
| KIAA0774 | 23281 | 13 | 4.74E−03 | 3.05E−04 |
| RAPGEF4 | 11069 | 2 | 1.85E−03 | 3.70E−04 |
| PTPRT | 11122 | 20 | 1.69E−03 | 3.85E−04 |
| DGKB | 1607 | 7 | 1.73E−03 | 4.49E−04 |
| POU6F2 | 11281 | 7 | 2.44E−03 | 4.70E−04 |
| GRM7 | 2917 | 3 | 3.81E−03 | 4.77E−04 |
| NAV3 | 89795 | 12 | 4.28E−03 | 4.79E−04 |
| C12orf26 | 84190 | 12 | 1.40E−03 | 4.92E−04 |
| FSTL4 | 23105 | 5 | 3.58E−03 | 5.00E−04 |
| MAGI2 | 9863 | 7 | 1.91E−06 | 5.42E−04 |
| LRP1B | 53353 | 2 | 1.25E−03 | 5.62E−04 |
| CNTN5 | 53942 | 11 | 1.91E−03 | 5.76E−04 |
| RORA | 6095 | 15 | 5.06E−04 | 6.04E−04 |
| NAALADL2 | 254827 | 3 | 4.08E−04 | 6.64E−04 |
| VGCNL1 | 259232 | 13 | 7.53E−04 | 7.22E−04 |
| NTN1 | 9423 | 17 | 3.31E−04 | 7.49E−04 |
| PAPPA2 | 60676 | 1 | 3.78E−03 | 7.84E−04 |
| NFIA | 4774 | 1 | 2.80E−03 | 7.89E−04 |
| COL25A1 | 84570 | 4 | 1.73E−03 | 7.90E−04 |
| C10orf107 | 219621 | 10 | 1.11E−03 | 8.01E−04 |
| NTRK2 | 4915 | 9 | 8.20E−03 | 8.42E−04 |
| KCNQ5 | 56479 | 6 | 2.20E−03 | 8.80E−04 |
| ARL15 | 54622 | 5 | 3.45E−05 | 9.40E−04 |
| TCBA1 | 154215 | 6 | 4.05E−03 | 9.59E−04 |
| FLJ33708 | 285780 | 6 | 4.08E−06 | Flanking |
| GALC | 2581 | 14 | 3.17E−05 | Flanking |
| LOC644954 | 644954 | 10 | 6.68E−05 | Flanking |
| SPATA4 | 132851 | 4 | 3.52E−04 | Flanking |
| APLP2 | 334 | 11 | 7.24E−04 | Flanking |
| E2F2 | 1870 | 1 | 8.90E−04 | Flanking |
| LOC653748 | 653748 | 7 | 9.00E−04 | Flanking |
| DKFZP566M1046 | 84067 | 11 | 1.16E−03 | Flanking |
| C10orf112 | 340895 | 10 | 1.21E−03 | Flanking |
| GPC6 | 10082 | 13 | 1.67E−03 | Flanking |
| PLEKHA7 | 144100 | 11 | 1.85E−03 | Flanking |
| RIPK5 | 25778 | 1 | 2.00E−03 | Flanking |
| CRSP8 | 9442 | 9 | 2.19E−03 | Flanking |
| LOC646697 | 646697 | 4 | 2.19E−03 | Flanking |
| DTNA | 1837 | 18 | 3.02E−03 | Flanking |
| C20orf133 | 140733 | 20 | 3.44E−03 | Flanking |
| KIAA0746 | 23231 | 4 | 3.55E−03 | Flanking |
| ZNF659 | 79750 | 3 | 3.77E−03 | Flanking |
| DDAH1 | 23576 | 1 | 4.02E−03 | Flanking |
| SYNE1 | 23345 | 6 | 4.05E−03 | Flanking |
| FBXO33 | 254170 | 14 | 4.40E−03 | Flanking |
| RGS3 | 5998 | 9 | 4.42E−03 | Flanking |
| PALLD | 23022 | 4 | 4.53E−03 | Flanking |
| ZBTB20 | 26137 | 3 | 4.98E−03 | Flanking |
| ROR1 | 4919 | 1 | 5.32E−03 | Flanking |

Flanking: gene is 100kb from the snp that has a P-value < 0.001 in the replication study.

[0174] TABLE 2
SNP markers with P-value less than 0.005 for HDL from t-test assuming
equal variaces between groups. Number of observations are marked by n1 and n2
and group avarages by avg1 and avg2.

| RS_id | SEQ_ID_no | Gene | Gene_id | Chr | Position | n1 | avg1 | n2 | avg2 | ttest | df | P-value |
|---|---|---|---|---|---|---|---|---|---|---|---|---|
| RS2195989 | 872 | ANGPT1 | 284 | 8 | 108555088 | 71 | 1.46 | 409 | 1.27 | 4.78 | 478 | 2.34E−06 |
| RS1480145 | 796 | | | 8 | 16181494 | 488 | 1.29 | 12 | 1.67 | 4.42 | 498 | 1.21E−05 |
| RS2029259 | 484 | | | 4 | 188422292 | 437 | 1.28 | 57 | 1.46 | 4.42 | 492 | 1.22E−05 |
| RS10503573 | 780 | MSR1 | 4481 | 8 | 16047855 | 486 | 1.29 | 14 | 1.63 | 4.25 | 498 | 2.55E−05 |
| RS4631686 | 3 | | | 1 | 14322780 | 482 | 1.29 | 8 | 1.74 | 4.22 | 488 | 2.91E−05 |
| RS250387 | 518 | ARL15 | 54622 | 5 | 53620394 | 411 | 1.27 | 83 | 1.42 | 4.18 | 492 | 3.45E−05 |
| RS1851006 | 1278 | UNC13C | 440279 | 15 | 52691684 | 156 | 1.22 | 212 | 1.35 | 4.09 | 366 | 5.31E−05 |
| RS10503586 | 803 | | | 8 | 16792998 | 476 | 1.29 | 12 | 1.65 | 4.05 | 486 | 5.96E−05 |
| RS397618 | 1063 | TMEM16C | 63982 | 11 | 26546754 | 486 | 1.29 | 14 | 1.61 | 4.01 | 498 | 7.00E−05 |
| RS285406 | 855 | | | 8 | 87094129 | 478 | 1.29 | 22 | 1.55 | 3.99 | 498 | 7.60E−05 |
| RS2854946 | 1259 | SERPINA5 | 5104 | 14 | 94118132 | 335 | 1.26 | 93 | 1.4 | 3.94 | 426 | 9.52E−05 |
| RS33375 | 598 | | | 5 | 170998718 | 407 | 1.28 | 61 | 1.44 | 3.92 | 466 | 1.02E−04 |
| RS10516673 | 370 | HNRPD | 3184 | 4 | 83635972 | 487 | 1.29 | 13 | 1.62 | 3.91 | 498 | 1.05E−04 |
| RS4770403 | 1173 | SGCG | 6445 | 13 | 22653127 | 448 | 1.28 | 52 | 1.45 | 3.88 | 498 | 1.18E−04 |
| RS9315157 | 1181 | 13CDNA73 | 10129 | 13 | 31642352 | 435 | 1.28 | 61 | 1.43 | 3.88 | 494 | 1.19E−04 |
| RS346421 | 527 | | | 5 | 62565739 | 447 | 1.28 | 47 | 1.46 | 3.86 | 492 | 1.29E−04 |
| RS6990997 | 867 | ZFPM2 | 23414 | 8 | 106881703 | 443 | 1.28 | 51 | 1.45 | 3.86 | 492 | 1.29E−04 |
| RS2170116 | 791 | | | 8 | 16157007 | 481 | 1.29 | 19 | 1.56 | 3.85 | 498 | 1.34E−04 |
| RS3770899 | 163 | CRIM1 | 51232 | 2 | 36566423 | 454 | 1.29 | 36 | 1.49 | 3.84 | 488 | 1.39E−04 |
| RS341148 | 696 | TULP4 | 56995 | 6 | 158810407 | 251 | 1.33 | 105 | 1.2 | 3.85 | 354 | 1.40E−04 |
| RS10517562 | 436 | | | 4 | 153393348 | 164 | 1.22 | 328 | 1.33 | 3.81 | 490 | 1.57E−04 |
| RS1226489 | 634 | GPR110 | 266977 | 6 | 47100017 | 478 | 1.29 | 10 | 1.65 | 3.81 | 486 | 1.57E−04 |
| RS10506790 | 1141 | | | 12 | 77762475 | 456 | 1.28 | 44 | 1.46 | 3.8 | 498 | 1.63E−04 |
| RS10482871 | 1439 | | | 21 | 15700259 | 495 | 1.29 | 5 | 1.8 | 3.8 | 498 | 1.63E−04 |
| RS10503572 | 789 | | | 8 | 16131101 | 491 | 1.29 | 5 | 1.81 | 3.8 | 494 | 1.63E−04 |
| RS9299445 | 993 | LOC644954 | 644954 | 10 | 63244794 | 446 | 1.28 | 40 | 1.47 | 3.8 | 484 | 1.63E−04 |
| RS10520350 | 472 | | | 4 | 177769342 | 478 | 1.28 | 20 | 1.54 | 3.79 | 496 | 1.69E−04 |
| RS965158 | 868 | | | 8 | 107564094 | 489 | 1.29 | 11 | 1.64 | 3.78 | 498 | 1.76E−04 |
| RS539254 | 836 | | | 8 | 80079448 | 343 | 1.28 | 91 | 1.41 | 3.74 | 432 | 2.09E−04 |
| RS10488888 | 395 | | | 4 | 111641312 | 490 | 1.29 | 8 | 1.69 | 3.72 | 496 | 2.22E−04 |
| RS2277456 | 1238 | PYGL | 5836 | 14 | 50447627 | 390 | 1.28 | 34 | 1.48 | 3.72 | 422 | 2.26E−04 |
| RS250388 | 519 | ARL15 | 54622 | 5 | 53621019 | 423 | 1.27 | 65 | 1.42 | 3.71 | 486 | 2.31E−04 |
| RS10485111 | 681 | | | 6 | 116299831 | 428 | 1.28 | 64 | 1.42 | 3.7 | 490 | 2.40E−04 |
| RS1577879 | 34 | | | 1 | 80924966 | 385 | 1.28 | 89 | 1.41 | 3.67 | 472 | 2.70E−04 |
| RS10512405 | 927 | SVEP1 | 79987 | 9 | 110316352 | 308 | 1.28 | 92 | 1.42 | 3.65 | 398 | 2.97E−04 |
| RS439269 | 897 | | | 9 | 14481347 | 440 | 1.28 | 58 | 1.43 | 3.63 | 496 | 3.13E−04 |
| RS1044045 | 1167 | EFHA1 | 221154 | 13 | 20965072 | 398 | 1.33 | 86 | 1.19 | 3.63 | 482 | 3.14E−04 |
| RS2056247 | 1092 | | | 11 | 93315872 | 406 | 1.27 | 94 | 1.4 | 3.62 | 498 | 3.25E−04 |
| RS9312592 | 462 | SPATA4 | 132851 | 4 | 177493018 | 60 | 1.43 | 408 | 1.28 | 3.6 | 466 | 3.52E−04 |
| RS9299446 | 994 | LOC644954 | 644954 | 10 | 63244886 | 457 | 1.28 | 43 | 1.45 | 3.59 | 498 | 3.63E−04 |
| RS1407466 | 889 | | | 9 | 7958548 | 403 | 1.27 | 93 | 1.4 | 3.58 | 494 | 3.78E−04 |
| RS9316436 | 1168 | EFHA1 | 221154 | 13 | 21000655 | 424 | 1.32 | 68 | 1.18 | 3.58 | 490 | 3.78E−04 |
| RS362988 | 1422 | SNAP25 | 6616 | 20 | 10229370 | 242 | 1.34 | 196 | 1.24 | 3.58 | 436 | 3.82E−04 |
| RS1942578 | 1402 | | | 18 | 73322001 | 279 | 1.33 | 211 | 1.24 | 3.57 | 488 | 3.92E−04 |
| RS4611835 | 313 | NAALADL2 | 254827 | 3 | 176610777 | 459 | 1.29 | 23 | 1.52 | 3.56 | 480 | 4.08E−04 |
| RS340686 | 500 | | | 5 | 8440200 | 107 | 1.21 | 391 | 1.32 | 3.54 | 496 | 4.38E−04 |
| RS1905155 | 556 | | | 5 | 113301097 | 313 | 1.32 | 141 | 1.21 | 3.54 | 452 | 4.42E−04 |
| RS10513319 | 952 | | | 9 | 117781003 | 482 | 1.29 | 16 | 1.56 | 3.53 | 496 | 4.54E−04 |
| RS1502887 | 358 | FRAS1 | 80144 | 4 | 79340562 | 455 | 1.29 | 41 | 1.46 | 3.52 | 494 | 4.71E−04 |
| RS723043 | 157 | LTBP1 | 4052 | 2 | 33453438 | 255 | 1.25 | 189 | 1.35 | 3.51 | 442 | 4.94E−04 |
| RS2414689 | 1285 | RORA | 6095 | 15 | 59051547 | 79 | 1.38 | 195 | 1.25 | 3.52 | 272 | 5.06E−04 |
| RS10509764 | 1013 | CNNM2 | 54805 | 10 | 104766465 | 348 | 1.33 | 150 | 1.23 | 3.5 | 496 | 5.07E−04 |
| RS8049647 | 1310 | | | 16 | 50695297 | 408 | 1.28 | 90 | 1.4 | 3.5 | 496 | 5.07E−04 |
| RS6954679 | 728 | | | 7 | 62940814 | 452 | 1.28 | 44 | 1.45 | 3.5 | 494 | 5.07E−04 |
| RS2222654 | 430 | | | 4 | 137363666 | 198 | 1.35 | 244 | 1.25 | 3.5 | 440 | 5.13E−04 |
| RS295525 | 525 | | | 5 | 60508623 | 487 | 1.29 | 13 | 1.58 | 3.49 | 498 | 5.26E−04 |
| RS10514844 | 1182 | | | 13 | 37808480 | 489 | 1.29 | 7 | 1.69 | 3.49 | 494 | 5.26E−04 |
| RS10504709 | 848 | | | 8 | 80781919 | 118 | 1.39 | 372 | 1.27 | 3.49 | 488 | 5.27E−04 |
| RS295577 | 524 | mimitin | 91942 | 5 | 60457592 | 472 | 1.29 | 14 | 1.57 | 3.48 | 484 | 5.47E−04 |
| RS340680 | 499 | | | 5 | 8438180 | 100 | 1.21 | 384 | 1.32 | 3.48 | 482 | 5.47E−04 |
| RS2034022 | 1396 | DOK6 | 220164 | 18 | 65341066 | 307 | 1.34 | 177 | 1.24 | 3.48 | 482 | 5.47E−04 |
| RS3218491 | 753 | XRCC2 | 7516 | 7 | 151791396 | 482 | 1.29 | 6 | 1.72 | 3.47 | 486 | 5.67E−04 |
| RS1433450 | 1293 | | | 15 | 85342066 | 450 | 1.31 | 46 | 1.15 | 3.46 | 494 | 5.87E−04 |
| RS6741304 | 175 | LOC400954 | 400954 | 2 | 55099846 | 336 | 1.26 | 152 | 1.37 | 3.46 | 486 | 5.88E−04 |
| RS745708 | 976 | FRMPD2 | 143162 | 10 | 49115681 | 363 | 1.27 | 79 | 1.39 | 3.46 | 440 | 5.93E−04 |
| RS2254162 | 774 | | | 8 | 14632707 | 278 | 1.27 | 76 | 1.39 | 3.46 | 352 | 6.07E−04 |
| RS1490125 | 651 | | | 6 | 66451580 | 428 | 1.32 | 66 | 1.18 | 3.45 | 492 | 6.09E−04 |
| RS1452528 | 670 | | | 6 | 79155079 | 247 | 1.34 | 241 | 1.25 | 3.45 | 486 | 6.09E−04 |
| RS7738834 | 671 | | | 6 | 79215706 | 260 | 1.33 | 132 | 1.22 | 3.45 | 390 | 6.22E−04 |
| RS2333821 | 170 | LOC646790 | 646790 | 2 | 44288177 | 330 | 1.27 | 146 | 1.37 | 3.44 | 474 | 6.33E−04 |
| RS2785949 | 1195 | | | 13 | 53806676 | 327 | 1.27 | 141 | 1.37 | 3.44 | 466 | 6.34E−04 |
| RS2110556 | 704 | | | 7 | 7556827 | 160 | 1.36 | 230 | 1.26 | 3.44 | 388 | 6.45E−04 |
| RS4733224 | 817 | WRN | 7486 | 8 | 31086911 | 280 | 1.25 | 182 | 1.35 | 3.42 | 460 | 6.82E−04 |
| RS10500783 | 1049 | | | 11 | 13530190 | 444 | 1.28 | 52 | 1.43 | 3.41 | 494 | 7.03E−04 |
| RS1607664 | 1410 | ZNF429 | 353088 | 19 | 21497820 | 396 | 1.27 | 90 | 1.39 | 3.41 | 484 | 7.04E−04 |
| RS1935229 | 1 | CAMTA1 | 23261 | 1 | 7695267 | 463 | 1.29 | 33 | 1.47 | 3.4 | 494 | 7.28E−04 |
| RS2127258 | 566 | | | 5 | 117512842 | 451 | 1.28 | 45 | 1.44 | 3.4 | 494 | 7.28E−04 |
| RS6699989 | 44 | | | 1 | 87784403 | 80 | 1.4 | 412 | 1.28 | 3.4 | 490 | 7.29E−04 |
| RS2357344 | 1242 | SYNE2 | 23224 | 14 | 63578006 | 404 | 1.27 | 36 | 1.45 | 3.4 | 438 | 7.36E−04 |
| RS2863171 | 1074 | | | 11 | 45207308 | 51 | 1.44 | 385 | 1.29 | 3.4 | 434 | 7.36E−04 |
| RS2405708 | 428 | | | 4 | 137339327 | 169 | 1.36 | 231 | 1.25 | 3.4 | 398 | 7.42E−04 |
| RS979323 | 1248 | | | 14 | 84118710 | 275 | 1.26 | 185 | 1.36 | 3.39 | 458 | 7.59E−04 |
| RS1025927 | 831 | TRPA1 | 8989 | 8 | 73125689 | 469 | 1.29 | 29 | 1.48 | 3.38 | 496 | 7.82E−04 |
| RS10509161 | 996 | LOC644954 | 644954 | 10 | 63245347 | 454 | 1.28 | 38 | 1.46 | 3.38 | 490 | 7.83E−04 |
| RS4146127 | 350 | | | 4 | 59260295 | 408 | 1.28 | 80 | 1.4 | 3.38 | 486 | 7.83E−04 |
| RS4510935 | 945 | | | 9 | 117364905 | 424 | 1.28 | 74 | 1.41 | 3.37 | 496 | 8.10E−04 |
| RS10490025 | 235 | KIAA1843 | 84540 | 2 | 210558906 | 456 | 1.29 | 36 | 1.46 | 3.37 | 490 | 8.11E−04 |
| RS10517618 | 439 | | | 4 | 156628360 | 327 | 1.26 | 131 | 1.36 | 3.37 | 456 | 8.16E−04 |
| RS1226491 | 633 | GPR110 | 266977 | 6 | 47097807 | 486 | 1.29 | 14 | 1.56 | 3.36 | 498 | 8.39E−04 |
| RS1544589 | 733 | PTPN12 | 5782 | 7 | 76874004 | 226 | 1.35 | 274 | 1.26 | 3.36 | 498 | 8.39E−04 |
| RS10513301 | 943 | ASTN2 | 23245 | 9 | 117241331 | 414 | 1.28 | 82 | 1.4 | 3.35 | 494 | 8.70E−04 |
| RS719484 | 1228 | | | 14 | 26547587 | 408 | 1.28 | 74 | 1.41 | 3.35 | 480 | 8.72E−04 |
| RS198278 | 711 | | | 7 | 24021433 | 233 | 1.24 | 243 | 1.33 | 3.35 | 474 | 8.73E−04 |
| RS3800818 | 730 | FLJ10099 | 55069 | 7 | 65865293 | 408 | 1.32 | 58 | 1.17 | 3.35 | 464 | 8.74E−04 |
| RS7087360 | 966 | CUBN | 8029 | 10 | 16912343 | 426 | 1.28 | 22 | 1.5 | 3.35 | 446 | 8.77E−04 |
| RS967220 | 264 | | | 3 | 29275054 | 72 | 1.19 | 348 | 1.33 | 3.35 | 418 | 8.81E−04 |
| RS596255 | 837 | | | 8 | 80164544 | 355 | 1.27 | 141 | 1.37 | 3.34 | 494 | 9.01E−04 |
| RS717806 | 160 | | | 2 | 36487186 | 358 | 1.27 | 122 | 1.37 | 3.34 | 478 | 9.03E−04 |
| RS868691 | 971 | | | 10 | 25945882 | 448 | 1.28 | 32 | 1.47 | 3.33 | 478 | 9.36E−04 |
| RS1424963 | 174 | | | 2 | 53360168 | 56 | 1.44 | 378 | 1.29 | 3.33 | 432 | 9.43E−04 |
| RS4890429 | 1387 | RIT2 | 6014 | 18 | 38951479 | 352 | 1.27 | 138 | 1.37 | 3.32 | 488 | 9.68E−04 |
| RS1541503 | 703 | LOC285929 | 285929 | 7 | 7173834 | 440 | 1.28 | 42 | 1.44 | 3.32 | 480 | 9.69E−04 |
| RS1867584 | 985 | | | 10 | 49321355 | 196 | 1.36 | 254 | 1.26 | 3.32 | 448 | 9.74E−04 |
| RS10500986 | 1053 | LUZP2 | 338645 | 11 | 24592114 | 363 | 1.28 | 95 | 1.39 | 3.31 | 456 | 1.01E−03 |
| RS10505540 | 882 | CCDC23 | 137196 | 8 | 130592619 | 479 | 1.29 | 21 | 1.51 | 3.3 | 498 | 1.04E−03 |
| RS4646981 | 1106 | NCAM1 | 4684 | 11 | 112596015 | 488 | 1.29 | 10 | 1.61 | 3.3 | 496 | 1.04E−03 |
| RS10507082 | 1148 | | | 12 | 96255332 | 107 | 1.21 | 371 | 1.32 | 3.3 | 476 | 1.04E−03 |
| RS10495202 | 115 | LOC644053 | 644053 | 1 | 219385670 | 382 | 1.27 | 118 | 1.38 | 3.29 | 498 | 1.07E−03 |
| RS171785 | 596 | | | 5 | 170994432 | 174 | 1.35 | 322 | 1.26 | 3.29 | 494 | 1.07E−03 |
| RS725500 | 364 | | | 4 | 80236951 | 384 | 1.31 | 106 | 1.21 | 3.29 | 488 | 1.07E−03 |
| RS1565741 | 804 | | | 8 | 16799856 | 431 | 1.28 | 59 | 1.42 | 3.29 | 488 | 1.07E−03 |
| RS717694 | 442 | | | 4 | 156772800 | 104 | 1.21 | 380 | 1.32 | 3.29 | 482 | 1.08E−03 |
| RS9312013 | 260 | | | 3 | 8299589 | 457 | 1.29 | 11 | 1.6 | 3.29 | 466 | 1.08E−03 |
| RS10509158 | 990 | C10orf107 | 219621 | 10 | 63177675 | 396 | 1.28 | 88 | 1.4 | 3.28 | 482 | 1.11E−03 |
| RS1813404 | 1246 | | | 14 | 84116590 | 329 | 1.26 | 147 | 1.36 | 3.28 | 474 | 1.11E−03 |
| RS1252225 | 854 | LOC138046 | 138046 | 8 | 85677664 | 292 | 1.27 | 102 | 1.38 | 3.28 | 392 | 1.13E−03 |
| RS10516142 | 601 | FLT4 | 2324 | 5 | 180003769 | 492 | 1.29 | 8 | 1.64 | 3.27 | 498 | 1.15E−03 |
| RS9284617 | 361 | FRAS1 | 80144 | 4 | 79349747 | 457 | 1.28 | 41 | 1.45 | 3.27 | 496 | 1.15E−03 |
| RS10517616 | 441 | | | 4 | 156733549 | 335 | 1.33 | 163 | 1.23 | 3.27 | 496 | 1.15E−03 |
| RS7706518 | 576 | | | 5 | 127308921 | 450 | 1.28 | 48 | 1.43 | 3.27 | 496 | 1.15E−03 |
| RS7718000 | 551 | | | 5 | 112998258 | 487 | 1.29 | 5 | 1.74 | 3.27 | 490 | 1.15E−03 |
| RS3890717 | 114 | | | 1 | 217860308 | 214 | 1.35 | 276 | 1.26 | 3.27 | 488 | 1.15E−03 |
| RS896990 | 251 | MGC42174 | 129563 | 2 | 232714361 | 437 | 1.29 | 47 | 1.44 | 3.27 | 482 | 1.15E−03 |
| RS10498121 | 242 | | | 2 | 222353045 | 460 | 1.29 | 22 | 1.5 | 3.27 | 480 | 1.15E−03 |
| RS10500660 | 1038 | DKFZP566M1046 | 84067 | 11 | 6199970 | 363 | 1.27 | 103 | 1.38 | 3.27 | 464 | 1.16E−03 |
| RS10489027 | 392 | | | 4 | 109645336 | 322 | 1.27 | 136 | 1.38 | 3.27 | 456 | 1.16E−03 |
| RS989177 | 748 | | | 7 | 124006837 | 70 | 1.41 | 358 | 1.27 | 3.26 | 426 | 1.20E−03 |
| RS2362932 | 120 | SMYD3 | 64754 | 1 | 242240325 | 141 | 1.38 | 273 | 1.28 | 3.26 | 412 | 1.21E−03 |
| RS4934799 | 972 | | | 10 | 36577492 | 378 | 1.32 | 122 | 1.22 | 3.25 | 498 | 1.23E−03 |
| RS10513299 | 941 | ASTN2 | 23245 | 9 | 117184531 | 428 | 1.28 | 64 | 1.41 | 3.25 | 490 | 1.23E−03 |
| RS6856098 | 331 | PCDH7 | 5099 | 4 | 30797074 | 393 | 1.28 | 97 | 1.38 | 3.25 | 488 | 1.23E−03 |
| RS722569 | 963 | | | 10 | 10538667 | 201 | 1.25 | 289 | 1.34 | 3.25 | 488 | 1.23E−03 |
| RS1385775 | 206 | LRP1B | 53353 | 2 | 141112833 | 195 | 1.33 | 223 | 1.25 | 3.25 | 416 | 1.25E−03 |
| RS1156968 | 1233 | | | 14 | 38232538 | 439 | 1.28 | 57 | 1.42 | 3.24 | 494 | 1.28E−03 |
| RS10509448 | 1005 | NRG3 | 10718 | 10 | 83972610 | 449 | 1.29 | 21 | 1.51 | 3.24 | 468 | 1.28E−03 |
| RS666941 | 240 | | | 2 | 221567963 | 262 | 1.33 | 206 | 1.24 | 3.24 | 466 | 1.28E−03 |
| RS1428250 | 508 | | | 5 | 38252169 | 450 | 1.29 | 14 | 1.55 | 3.24 | 462 | 1.28E−03 |
| RS10509160 | 995 | LOC644954 | 644954 | 10 | 63245218 | 457 | 1.28 | 43 | 1.44 | 3.23 | 498 | 1.32E−03 |
| RS10495466 | 118 | FMN2 | 56776 | 1 | 236834608 | 474 | 1.29 | 22 | 1.5 | 3.23 | 494 | 1.32E−03 |
| RS7148403 | 1234 | | | 14 | 38248309 | 441 | 1.28 | 55 | 1.42 | 3.23 | 494 | 1.32E−03 |
| RS1936671 | 97 | | | 1 | 189055410 | 373 | 1.27 | 121 | 1.37 | 3.23 | 492 | 1.32E−03 |
| RS10485148 | 619 | | | 6 | 23080312 | 340 | 1.27 | 150 | 1.37 | 3.23 | 488 | 1.32E−03 |
| RS1792369 | 1090 | FAT3 | 120114 | 11 | 92092081 | 203 | 1.25 | 287 | 1.34 | 3.23 | 488 | 1.32E−03 |
| RS1604613 | 1197 | | | 13 | 69021604 | 217 | 1.33 | 255 | 1.25 | 3.23 | 470 | 1.32E−03 |
| RS4668806 | 139 | | | 2 | 13630775 | 263 | 1.34 | 207 | 1.25 | 3.23 | 468 | 1.33E−03 |
| RS10518089 | 357 | SLC4A4 | 8671 | 4 | 72794260 | 367 | 1.27 | 131 | 1.37 | 3.22 | 496 | 1.37E−03 |
| RS9285122 | 1183 | | | 13 | 37809901 | 490 | 1.29 | 8 | 1.64 | 3.22 | 496 | 1.37E−03 |
| RS2150468 | 1184 | UFM1 | 51569 | 13 | 37825888 | 490 | 1.29 | 8 | 1.64 | 3.22 | 496 | 1.37E−03 |
| RS2217486 | 489 | | | 4 | 188707345 | 103 | 1.38 | 393 | 1.27 | 3.22 | 494 | 1.37E−03 |
| RS7897663 | 1015 | NT5C2 | 22978 | 10 | 104895594 | 343 | 1.33 | 153 | 1.23 | 3.21 | 494 | 1.41E−03 |
| RS2278016 | 1308 | | | 16 | 50674510 | 402 | 1.28 | 86 | 1.39 | 3.21 | 486 | 1.42E−03 |
| RS2969004 | 422 | | | 4 | 131139275 | 182 | 1.36 | 276 | 1.27 | 3.21 | 456 | 1.42E−03 |
| RS1016579 | 881 | | | 8 | 129269143 | 412 | 1.28 | 28 | 1.46 | 3.21 | 438 | 1.42E−03 |
| RS2323936 | 1186 | | | 13 | 38001773 | 492 | 1.29 | 8 | 1.64 | 3.2 | 498 | 1.46E−03 |
| RS2323937 | 1187 | | | 13 | 38001927 | 492 | 1.29 | 8 | 1.64 | 3.2 | 498 | 1.46E−03 |
| RS2409037 | 577 | | | 5 | 127314089 | 448 | 1.28 | 48 | 1.43 | 3.2 | 494 | 1.46E−03 |
| RS3815035 | 1355 | MAP2K6 | 5608 | 17 | 65043983 | 438 | 1.28 | 58 | 1.42 | 3.2 | 494 | 1.46E−03 |
| RS10517222 | 332 | | | 4 | 30831187 | 383 | 1.27 | 111 | 1.37 | 3.2 | 492 | 1.46E−03 |
| RS1861373 | 1150 | | | 12 | 96275336 | 212 | 1.25 | 282 | 1.34 | 3.2 | 492 | 1.46E−03 |
| RS10511857 | 904 | | | 9 | 30276600 | 408 | 1.28 | 82 | 1.4 | 3.2 | 488 | 1.46E−03 |
| RS1916043 | 1050 | PSMA1 | 5682 | 11 | 14593532 | 456 | 1.29 | 34 | 1.46 | 3.2 | 488 | 1.46E−03 |
| RS1927914 | 951 | TLR4 | 7099 | 9 | 117544279 | 220 | 1.34 | 266 | 1.25 | 3.2 | 484 | 1.46E−03 |
| RS741651 | 1243 | | | 14 | 80689322 | 443 | 1.28 | 39 | 1.45 | 3.2 | 480 | 1.47E−03 |
| RS2477035 | 965 | | | 10 | 10571483 | 193 | 1.25 | 287 | 1.34 | 3.2 | 478 | 1.47E−03 |
| RS631807 | 613 | LOC442161 | 442161 | 6 | 10475686 | 338 | 1.27 | 132 | 1.37 | 3.2 | 468 | 1.47E−03 |
| RS3805134 | 295 | SLC15A2 | 6565 | 3 | 123100746 | 189 | 1.35 | 277 | 1.26 | 3.2 | 464 | 1.47E−03 |
| RS1517290 | 440 | | | 4 | 156679488 | 219 | 1.26 | 199 | 1.35 | 3.2 | 416 | 1.48E−03 |
| RS10516865 | 379 | | | 4 | 91462479 | 495 | 1.29 | 5 | 1.72 | 3.19 | 498 | 1.51E−03 |
| RS10514845 | 1185 | | | 13 | 37910815 | 488 | 1.29 | 8 | 1.64 | 3.19 | 494 | 1.51E−03 |
| RS1886452 | 1200 | | | 13 | 72884855 | 395 | 1.28 | 95 | 1.39 | 3.19 | 488 | 1.51E−03 |
| RS2834370 | 1454 | | | 21 | 34346680 | 460 | 1.29 | 16 | 1.54 | 3.19 | 474 | 1.52E−03 |
| RS2811930 | 909 | UBQLN1 | 29979 | 9 | 83513404 | 247 | 1.33 | 157 | 1.23 | 3.19 | 402 | 1.53E−03 |
| RS10492335 | 1156 | | | 12 | 113042283 | 474 | 1.31 | 26 | 1.11 | 3.18 | 498 | 1.56E−03 |
| RS10502320 | 1361 | LOC388458 | 388458 | 18 | 4137742 | 267 | 1.34 | 231 | 1.25 | 3.18 | 496 | 1.56E−03 |
| RS3912653 | 1091 | FAT3 | 120114 | 11 | 92135172 | 204 | 1.25 | 290 | 1.33 | 3.18 | 492 | 1.57E−03 |
| RS652238 | 1395 | | | 18 | 64109605 | 417 | 1.31 | 77 | 1.19 | 3.18 | 492 | 1.57E−03 |
| RS2169942 | 565 | | | 5 | 117512644 | 449 | 1.28 | 43 | 1.43 | 3.18 | 490 | 1.57E−03 |
| RS10510809 | 274 | | | 3 | 59414093 | 402 | 1.28 | 80 | 1.4 | 3.18 | 480 | 1.57E−03 |
| RS7963889 | 1134 | | | 12 | 73136950 | 156 | 1.35 | 284 | 1.25 | 3.18 | 438 | 1.58E−03 |
| RS10517442 | 351 | | | 4 | 59273158 | 88 | 1.39 | 412 | 1.28 | 3.17 | 498 | 1.62E−03 |
| RS7002137 | 769 | | | 8 | 10653610 | 425 | 1.28 | 73 | 1.4 | 3.17 | 496 | 1.62E−03 |
| RS10508392 | 960 | | | 10 | 9722419 | 466 | 1.29 | 30 | 1.47 | 3.17 | 494 | 1.62E−03 |
| RS10512935 | 304 | EPHB1 | 2047 | 3 | 136107953 | 381 | 1.27 | 109 | 1.38 | 3.17 | 488 | 1.62E−03 |
| RS10516655 | 366 | | | 4 | 82801964 | 372 | 1.28 | 118 | 1.38 | 3.17 | 488 | 1.62E−03 |
| RS10500474 | 1318 | | | 16 | 62073509 | 401 | 1.28 | 73 | 1.4 | 3.17 | 472 | 1.62E−03 |
| RS1556082 | 1215 | GPC6 | 10082 | 13 | 93502465 | 95 | 1.38 | 401 | 1.27 | 3.16 | 494 | 1.67E−03 |
| RS3897748 | 113 | | | 1 | 214677604 | 407 | 1.31 | 79 | 1.19 | 3.16 | 484 | 1.68E−03 |
| RS10488642 | 751 | TRIM24 | 8805 | 7 | 137646187 | 373 | 1.27 | 109 | 1.38 | 3.16 | 480 | 1.68E−03 |
| RS1407473 | 890 | | | 9 | 7989681 | 357 | 1.27 | 123 | 1.36 | 3.16 | 478 | 1.68E−03 |
| RS7453920 | 631 | HLA-DQB2 | 3120 | 6 | 32837990 | 187 | 1.35 | 291 | 1.26 | 3.16 | 476 | 1.68E−03 |
| RS10510155 | 1037 | | | 10 | 128313990 | 424 | 1.28 | 50 | 1.42 | 3.16 | 472 | 1.68E−03 |
| RS989766 | 1431 | PTPRT | 11122 | 20 | 40443639 | 320 | 1.27 | 116 | 1.38 | 3.16 | 434 | 1.69E−03 |
| RS6852538 | 427 | | | 4 | 137338578 | 221 | 1.34 | 275 | 1.26 | 3.15 | 494 | 1.73E−03 |
| RS1639239 | 707 | DGKB | 1607 | 7 | 14564608 | 91 | 1.21 | 403 | 1.32 | 3.15 | 492 | 1.73E−03 |
| RS2881290 | 394 | COL25A1 | 84570 | 4 | 110563718 | 432 | 1.31 | 60 | 1.18 | 3.15 | 490 | 1.73E−03 |
| RS10495618 | 140 | | | 2 | 13631037 | 284 | 1.33 | 206 | 1.25 | 3.15 | 488 | 1.73E−03 |
| RS10507083 | 1149 | | | 12 | 96255384 | 114 | 1.22 | 372 | 1.32 | 3.15 | 484 | 1.73E−03 |
| RS1926029 | 1014 | NT5C2 | 22978 | 10 | 104845660 | 314 | 1.33 | 80 | 1.21 | 3.15 | 392 | 1.76E−03 |
| RS591576 | 1203 | FBXL3 | 26224 | 13 | 76488937 | 81 | 1.39 | 419 | 1.28 | 3.14 | 498 | 1.79E−03 |
| RS10506626 | 1128 | TSPAN8 | 7103 | 12 | 69815758 | 341 | 1.27 | 153 | 1.36 | 3.14 | 492 | 1.79E−03 |
| RS1050692 | 970 | GPR158 | 57512 | 10 | 25677276 | 487 | 1.29 | 5 | 1.72 | 3.14 | 490 | 1.79E−03 |
| RS10519371 | 426 | | | 4 | 137332410 | 222 | 1.34 | 256 | 1.26 | 3.14 | 476 | 1.79E−03 |
| RS2043179 | 1273 | | | 15 | 44563353 | 239 | 1.25 | 239 | 1.33 | 3.14 | 476 | 1.79E−03 |
| RS2121956 | 79 | | | 1 | 104801417 | 196 | 1.35 | 278 | 1.26 | 3.14 | 472 | 1.80E−03 |
| RS7445088 | 526 | | | 5 | 62306508 | 404 | 1.28 | 68 | 1.4 | 3.14 | 470 | 1.80E−03 |
| RS1917952 | 429 | | | 4 | 137355240 | 205 | 1.35 | 251 | 1.26 | 3.14 | 454 | 1.80E−03 |
| RS3751462 | 1239 | LOC283553 | 283553 | 14 | 50897971 | 346 | 1.32 | 66 | 1.2 | 3.14 | 410 | 1.81E−03 |
| RS4757441 | 1051 | PLEKHA7 | 144100 | 11 | 16859250 | 440 | 1.31 | 60 | 1.18 | 3.13 | 498 | 1.85E−03 |
| RS10521210 | 1335 | | | 17 | 12966928 | 233 | 1.34 | 261 | 1.26 | 3.13 | 492 | 1.85E−03 |
| RS10514632 | 212 | RAPGEF4 | 11069 | 2 | 173530419 | 391 | 1.32 | 95 | 1.21 | 3.13 | 484 | 1.85E−03 |
| RS2296697 | 40 | LPHN2 | 23266 | 1 | 82149240 | 400 | 1.28 | 80 | 1.39 | 3.13 | 478 | 1.86E−03 |
| RS6978964 | 701 | SDK1 | 221935 | 7 | 3646860 | 437 | 1.28 | 61 | 1.41 | 3.12 | 496 | 1.91E−03 |
| RS10487779 | 709 | DGKB | 1607 | 7 | 14617576 | 105 | 1.21 | 393 | 1.32 | 3.12 | 496 | 1.91E−03 |
| RS4102401 | 866 | RRM2B | 50484 | 8 | 103288416 | 477 | 1.29 | 21 | 1.5 | 3.12 | 496 | 1.91E−03 |
| RS323416 | 1359 | | | 17 | 69240908 | 476 | 1.29 | 22 | 1.49 | 3.12 | 496 | 1.91E−03 |
| RS7794555 | 754 | LOC653748 | 653748 | 7 | 153481879 | 462 | 1.28 | 34 | 1.45 | 3.12 | 494 | 1.91E−03 |
| RS3118650 | 1194 | | | 13 | 49927325 | 482 | 1.29 | 14 | 1.54 | 3.12 | 494 | 1.91E−03 |
| RS10501933 | 1100 | CNTN5 | 53942 | 11 | 99284564 | 403 | 1.28 | 91 | 1.38 | 3.12 | 492 | 1.91E−03 |
| RS7768538 | 630 | HLA-DQB2 | 3120 | 6 | 32837799 | 299 | 1.26 | 193 | 1.35 | 3.12 | 490 | 1.92E−03 |
| RS10498836 | 654 | | | 6 | 66585591 | 422 | 1.32 | 64 | 1.19 | 3.12 | 484 | 1.92E−03 |
| RS9284616 | 360 | FRAS1 | 80144 | 4 | 79349710 | 448 | 1.28 | 32 | 1.45 | 3.12 | 478 | 1.92E−03 |
| RS10226709 | 708 | DGKB | 1607 | 7 | 14570874 | 382 | 1.32 | 68 | 1.19 | 3.12 | 448 | 1.93E−03 |
| RS10497689 | 224 | | | 2 | 188708247 | 495 | 1.29 | 5 | 1.71 | 3.11 | 498 | 1.98E−03 |
| RS2969001 | 423 | | | 4 | 131140397 | 305 | 1.26 | 195 | 1.35 | 3.11 | 498 | 1.98E−03 |
| RS10492135 | 1114 | GRIN2B | 2904 | 12 | 13777535 | 110 | 1.38 | 388 | 1.27 | 3.11 | 496 | 1.98E−03 |
| RS715428 | 1365 | KIAA1772 | 80000 | 18 | 17131449 | 486 | 1.29 | 12 | 1.57 | 3.11 | 496 | 1.98E−03 |
| RS10511852 | 903 | | | 9 | 30227951 | 477 | 1.29 | 15 | 1.54 | 3.11 | 490 | 1.98E−03 |
| RS10509863 | 1020 | | | 10 | 109828476 | 439 | 1.28 | 35 | 1.45 | 3.11 | 472 | 1.98E−03 |
| RS1598045 | 171 | LOC646790 | 646790 | 2 | 44288776 | 261 | 1.25 | 209 | 1.34 | 3.11 | 468 | 1.99E−03 |
| RS2089907 | 122 | | | 2 | 2454467 | 342 | 1.27 | 112 | 1.37 | 3.11 | 452 | 1.99E−03 |
| RS923544 | 45 | | | 1 | 87792449 | 246 | 1.34 | 246 | 1.26 | 3.1 | 490 | 2.05E−03 |
| RS2881836 | 234 | AOX2 | 344454 | 2 | 201469088 | 326 | 1.26 | 148 | 1.36 | 3.1 | 472 | 2.05E−03 |
| RS10504722 | 853 | ZBTB10 | 65986 | 8 | 81592447 | 60 | 1.41 | 396 | 1.28 | 3.1 | 454 | 2.06E−03 |
| RS2849382 | 1394 | BCL2 | 596 | 18 | 59127173 | 408 | 1.28 | 48 | 1.43 | 3.1 | 454 | 2.06E−03 |
| RS10490026 | 236 | KIAA1843 | 84540 | 2 | 210558951 | 460 | 1.29 | 40 | 1.44 | 3.09 | 498 | 2.11E−03 |
| RS10490028 | 238 | KIAA1843 | 84540 | 2 | 210560666 | 460 | 1.29 | 40 | 1.44 | 3.09 | 498 | 2.11E−03 |
| RS10517787 | 444 | | | 4 | 165039745 | 454 | 1.29 | 42 | 1.43 | 3.09 | 494 | 2.11E−03 |
| RS3886738 | 992 | LOC644954 | 644954 | 10 | 63234254 | 451 | 1.28 | 39 | 1.44 | 3.09 | 488 | 2.12E−03 |
| RS1293700 | 1416 | | | 19 | 58837765 | 65 | 1.41 | 417 | 1.29 | 3.09 | 480 | 2.12E−03 |
| RS1484317 | 76 | | | 1 | 101802287 | 342 | 1.28 | 110 | 1.38 | 3.09 | 450 | 2.13E−03 |
| RS10485880 | 736 | MAGI2 | 9863 | 7 | 77560883 | 376 | 1.28 | 56 | 1.41 | 3.09 | 430 | 2.13E−03 |
| RS10507926 | 1211 | | | 13 | 81335314 | 456 | 1.31 | 44 | 1.16 | 3.08 | 498 | 2.18E−03 |
| RS2480010 | 617 | | | 6 | 23014923 | 371 | 1.27 | 121 | 1.36 | 3.08 | 490 | 2.19E−03 |
| RS2072506 | 722 | AMPH | 273 | 7 | 38275635 | 459 | 1.29 | 31 | 1.46 | 3.08 | 488 | 2.19E−03 |
| RS10518211 | 365 | | | 4 | 80294244 | 265 | 1.33 | 223 | 1.25 | 3.08 | 486 | 2.19E−03 |
| RS10517561 | 434 | LOC646697 | 646697 | 4 | 153190724 | 296 | 1.26 | 192 | 1.35 | 3.08 | 486 | 2.19E−03 |
| RS4131874 | 819 | | | 8 | 42051123 | 124 | 1.22 | 364 | 1.32 | 3.08 | 486 | 2.19E−03 |
| RS9328534 | 954 | CRSP8 | 9442 | 9 | 131904359 | 335 | 1.32 | 153 | 1.23 | 3.08 | 486 | 2.19E−03 |
| RS9292042 | 517 | ARL15 | 54622 | 5 | 53572755 | 377 | 1.27 | 105 | 1.38 | 3.08 | 480 | 2.19E−03 |
| RS1429130 | 432 | | | 4 | 148581368 | 443 | 1.29 | 25 | 1.48 | 3.08 | 466 | 2.19E−03 |
| RS10505777 | 1113 | | | 12 | 13378527 | 354 | 1.3 | 4 | 1.77 | 3.08 | 356 | 2.23E−03 |
| RS10503626 | 808 | PSD3 | 23362 | 8 | 18591364 | 475 | 1.29 | 23 | 1.49 | 3.07 | 496 | 2.26E−03 |
| RS4440168 | 475 | | | 4 | 178345257 | 424 | 1.28 | 72 | 1.4 | 3.07 | 494 | 2.26E−03 |
| RS724334 | 273 | CAST1 | 26059 | 3 | 55933122 | 411 | 1.28 | 79 | 1.39 | 3.07 | 488 | 2.26E−03 |
| RS10497650 | 223 | | | 2 | 185048541 | 469 | 1.29 | 5 | 1.71 | 3.07 | 472 | 2.26E−03 |
| RS9318612 | 1208 | | | 13 | 78663468 | 239 | 1.26 | 235 | 1.34 | 3.07 | 472 | 2.26E−03 |
| RS4876853 | 878 | | | 8 | 119765786 | 448 | 1.29 | 10 | 1.59 | 3.07 | 456 | 2.27E−03 |
| RS4418368 | 758 | DLGAP2 | 9228 | 8 | 1585785 | 264 | 1.28 | 148 | 1.37 | 3.07 | 410 | 2.28E−03 |
| RS10514831 | 907 | | | 9 | 82681244 | 439 | 1.28 | 61 | 1.41 | 3.06 | 498 | 2.33E−03 |
| RS10495390 | 116 | RYR2 | 6262 | 1 | 233639054 | 448 | 1.28 | 46 | 1.43 | 3.06 | 492 | 2.33E−03 |
| RS10513792 | 317 | MCF2L2 | 23101 | 3 | 184517877 | 416 | 1.28 | 52 | 1.42 | 3.06 | 466 | 2.34E−03 |
| RS9327177 | 567 | | | 5 | 120387365 | 184 | 1.35 | 272 | 1.26 | 3.06 | 454 | 2.34E−03 |
| RS10489945 | 46 | | | 1 | 88125610 | 469 | 1.31 | 27 | 1.12 | 3.05 | 494 | 2.41E−03 |
| RS1121640 | 1099 | | | 11 | 96694636 | 464 | 1.29 | 32 | 1.46 | 3.05 | 494 | 2.41E−03 |
| RS3770186 | 241 | EPHA4 | 2043 | 2 | 222137844 | 385 | 1.28 | 109 | 1.38 | 3.05 | 492 | 2.41E−03 |
| RS979322 | 1247 | | | 14 | 84118568 | 288 | 1.26 | 206 | 1.34 | 3.05 | 492 | 2.41E−03 |
| RS1112809 | 210 | | | 2 | 148314459 | 436 | 1.31 | 52 | 1.18 | 3.05 | 486 | 2.41E−03 |
| RS1525647 | 725 | | | 7 | 45289320 | 106 | 1.38 | 374 | 1.28 | 3.05 | 478 | 2.42E−03 |
| RS2451947 | 1138 | | | 12 | 76451623 | 278 | 1.34 | 184 | 1.25 | 3.05 | 460 | 2.42E−03 |
| RS360559 | 644 | CRISP2 | 7180 | 6 | 49767830 | 275 | 1.34 | 173 | 1.25 | 3.05 | 446 | 2.42E−03 |
| RS997132 | 1204 | | | 13 | 76829538 | 274 | 1.25 | 164 | 1.34 | 3.05 | 436 | 2.43E−03 |
| RS2503102 | 679 | LOC442238 | 442238 | 6 | 100650488 | 282 | 1.33 | 144 | 1.24 | 3.05 | 424 | 2.43E−03 |
| RS10492047 | 1158 | LOC144678 | 144678 | 12 | 125460210 | 475 | 1.29 | 25 | 1.48 | 3.04 | 498 | 2.49E−03 |
| RS10495667 | 141 | VSNL1 | 7447 | 2 | 17745120 | 493 | 1.29 | 5 | 1.7 | 3.04 | 496 | 2.49E−03 |
| RS6650321 | 1214 | GPC6 | 10082 | 13 | 93419035 | 388 | 1.28 | 110 | 1.37 | 3.04 | 496 | 2.49E−03 |
| RS1818711 | 1279 | UNC13C | 440279 | 15 | 52692074 | 288 | 1.26 | 210 | 1.35 | 3.04 | 496 | 2.49E−03 |
| RS10489026 | 391 | | | 4 | 109640337 | 358 | 1.27 | 134 | 1.36 | 3.04 | 490 | 2.49E−03 |
| RS1322137 | 893 | | | 9 | 10220744 | 330 | 1.27 | 162 | 1.35 | 3.04 | 490 | 2.49E−03 |
| RS1749541 | 57 | ABCD3 | 5825 | 1 | 94670399 | 338 | 1.27 | 148 | 1.36 | 3.04 | 484 | 2.49E−03 |
| RS10489036 | 320 | KIAA1276 | 27146 | 4 | 17373956 | 350 | 1.27 | 130 | 1.36 | 3.04 | 478 | 2.50E−03 |
| RS10518502 | 419 | | | 4 | 127915337 | 349 | 1.32 | 121 | 1.22 | 3.04 | 468 | 2.50E−03 |
| RS2900932 | 1022 | | | 10 | 113232182 | 351 | 1.28 | 119 | 1.37 | 3.04 | 468 | 2.50E−03 |
| RS2304376 | 727 | GBAS | 2631 | 7 | 55823228 | 389 | 1.32 | 77 | 1.21 | 3.04 | 464 | 2.50E−03 |
| RS953273 | 92 | NMNAT2 | 23057 | 1 | 180031268 | 259 | 1.26 | 171 | 1.35 | 3.04 | 428 | 2.51E−03 |
| RS10495767 | 149 | FLJ34931 | 388939 | 2 | 29198843 | 357 | 1.27 | 47 | 1.42 | 3.04 | 402 | 2.52E−03 |
| RS878016 | 757 | DLGAP2 | 9228 | 8 | 1585693 | 355 | 1.27 | 143 | 1.36 | 3.03 | 496 | 2.57E−03 |
| RS2825652 | 1441 | | | 21 | 19865219 | 488 | 1.29 | 10 | 1.58 | 3.03 | 496 | 2.57E−03 |
| RS1487377 | 1375 | OSBPLIA | 114876 | 18 | 20137550 | 99 | 1.22 | 397 | 1.32 | 3.03 | 494 | 2.57E−03 |
| RS10484693 | 603 | GMDS | 2762 | 6 | 1855107 | 482 | 1.29 | 12 | 1.56 | 3.03 | 492 | 2.57E−03 |
| RS150344 | 1302 | | | 16 | 22728560 | 414 | 1.28 | 76 | 1.39 | 3.03 | 488 | 2.58E−03 |
| RS1886484 | 1199 | | | 13 | 71945230 | 178 | 1.35 | 308 | 1.27 | 3.03 | 484 | 2.58E−03 |
| RS10489925 | 67 | PAP2D | 163404 | 1 | 99173344 | 361 | 1.27 | 107 | 1.37 | 3.03 | 466 | 2.58E−03 |
| RS10486012 | 742 | | | 7 | 105824729 | 491 | 1.29 | 9 | 1.6 | 3.02 | 498 | 2.66E−03 |
| RS2161413 | 589 | | | 5 | 165940868 | 452 | 1.31 | 44 | 1.17 | 3.02 | 494 | 2.66E−03 |
| RS2162654 | 1155 | | | 12 | 113038233 | 467 | 1.3 | 29 | 1.13 | 3.02 | 494 | 2.66E−03 |
| RS7694034 | 377 | MAPK10 | 5602 | 4 | 87647635 | 402 | 1.31 | 84 | 1.2 | 3.02 | 484 | 2.66E−03 |
| RS7844425 | 818 | | | 8 | 32495159 | 321 | 1.27 | 155 | 1.36 | 3.02 | 474 | 2.66E−03 |
| RS2893569 | 723 | POU6F2 | 11281 | 7 | 38839984 | 461 | 1.29 | 7 | 1.64 | 3.02 | 466 | 2.67E−03 |
| RS4628499 | 119 | LOC645939 | 645939 | 1 | 237260520 | 379 | 1.27 | 87 | 1.38 | 3.02 | 464 | 2.67E−03 |
| RS2105233 | 117 | | | 1 | 235710329 | 375 | 1.32 | 81 | 1.2 | 3.02 | 454 | 2.67E−03 |
| RS10507553 | 1190 | | | 13 | 46687101 | 495 | 1.29 | 5 | 1.7 | 3.01 | 498 | 2.74E−03 |
| RS1852561 | 731 | | | 7 | 69770184 | 15 | 1.53 | 483 | 1.29 | 3.01 | 496 | 2.75E−03 |
| RS1460174 | 845 | | | 8 | 80266395 | 396 | 1.28 | 102 | 1.38 | 3.01 | 496 | 2.75E−03 |
| RS1938105 | 652 | | | 6 | 66567647 | 427 | 1.32 | 69 | 1.2 | 3.01 | 494 | 2.75E−03 |
| RS964453 | 1326 | USP10 | 9100 | 16 | 83325736 | 372 | 1.32 | 108 | 1.22 | 3.01 | 478 | 2.75E−03 |
| RS10509153 | 989 | | | 10 | 63041318 | 416 | 1.28 | 42 | 1.42 | 3.01 | 456 | 2.76E−03 |
| RS1582165 | 121 | | | 1 | 244927430 | 40 | 1.16 | 362 | 1.31 | 3.01 | 400 | 2.78E−03 |
| RS7574093 | 176 | | | 2 | 56818904 | 490 | 1.29 | 10 | 1.58 | 3 | 498 | 2.84E−03 |
| RS4684321 | 256 | | | 3 | 1842614 | 477 | 1.29 | 23 | 1.48 | 3 | 498 | 2.84E−03 |
| RS10491543 | 908 | | | 9 | 82683005 | 438 | 1.28 | 60 | 1.41 | 3 | 496 | 2.84E−03 |
| RS10483457 | 1232 | GARNL1 | 253959 | 14 | 35211683 | 464 | 1.29 | 34 | 1.45 | 3 | 496 | 2.84E−03 |
| RS2474263 | 678 | LOC442238 | 442238 | 6 | 100641976 | 315 | 1.32 | 177 | 1.24 | 3 | 490 | 2.84E−03 |
| RS10488693 | 1083 | C11orf11 | 747 | 11 | 61241732 | 467 | 1.29 | 23 | 1.48 | 3 | 488 | 2.84E−03 |
| RS1275637 | 1135 | | | 12 | 74445115 | 423 | 1.28 | 67 | 1.4 | 3 | 488 | 2.84E−03 |
| RS10488865 | 388 | | | 4 | 105801941 | 441 | 1.3 | 31 | 1.13 | 3 | 470 | 2.84E−03 |
| RS1537656 | 607 | | | 6 | 8060391 | 343 | 1.27 | 119 | 1.37 | 3 | 460 | 2.85E−03 |
| RS2248815 | 1453 | ITSN1 | 6453 | 21 | 34060196 | 386 | 1.32 | 59 | 1.19 | 3 | 446 | 2.85E−03 |
| RS10497776 | 228 | | | 2 | 196795652 | 493 | 1.29 | 5 | 1.7 | 2.99 | 496 | 2.93E−03 |
| RS10501410 | 1085 | CLPB | 81570 | 11 | 71766454 | 438 | 1.28 | 58 | 1.41 | 2.99 | 494 | 2.93E−03 |
| RS1513104 | 1127 | PTPRR | 5801 | 12 | 69387170 | 419 | 1.28 | 75 | 1.39 | 2.99 | 492 | 2.93E−03 |
| RS10223625 | 656 | | | 6 | 67183675 | 420 | 1.28 | 72 | 1.4 | 2.99 | 490 | 2.93E−03 |
| RS6987277 | 766 | | | 8 | 8977241 | 453 | 1.29 | 39 | 1.44 | 2.99 | 490 | 2.93E−03 |
| RS1964670 | 362 | FRAS1 | 80144 | 4 | 79351645 | 163 | 1.24 | 321 | 1.33 | 2.99 | 482 | 2.93E−03 |
| RS3124806 | 2 | CAMTA1 | 23261 | 1 | 7703744 | 456 | 1.28 | 26 | 1.45 | 2.99 | 480 | 2.93E−03 |
| RS219664 | 1445 | | | 21 | 26728062 | 376 | 1.32 | 104 | 1.22 | 2.99 | 478 | 2.93E−03 |
| RS1430593 | 739 | | | 7 | 84135009 | 400 | 1.32 | 70 | 1.2 | 2.99 | 468 | 2.94E−03 |
| RS10493179 | 5 | USP24 | 23358 | 1 | 55317664 | 413 | 1.29 | 43 | 1.43 | 2.99 | 454 | 2.94E−03 |
| RS4131826 | 87 | SDHC | 6391 | 1 | 158095457 | 349 | 1.27 | 147 | 1.36 | 2.98 | 494 | 3.02E−03 |
| RS7997251 | 1201 | | | 13 | 75508128 | 399 | 1.28 | 97 | 1.38 | 2.98 | 494 | 3.02E−03 |
| RS1786606 | 1384 | DTNA | 1837 | 18 | 30686115 | 417 | 1.32 | 79 | 1.21 | 2.98 | 494 | 3.02E−03 |
| RS2294311 | 1457 | HSPC117 | 51493 | 22 | 31117823 | 369 | 1.27 | 127 | 1.37 | 2.98 | 494 | 3.02E−03 |
| RS1343725 | 825 | | | 8 | 70070765 | 426 | 1.28 | 68 | 1.4 | 2.98 | 492 | 3.03E−03 |
| RS10509766 | 1016 | NT5C2 | 22978 | 10 | 104916324 | 339 | 1.33 | 151 | 1.24 | 2.98 | 488 | 3.03E−03 |
| RS2413809 | 1270 | | | 15 | 44497210 | 322 | 1.27 | 168 | 1.35 | 2.98 | 488 | 3.03E−03 |
| RS7164579 | 1288 | LCTL | 197021 | 15 | 64629063 | 26 | 1.47 | 456 | 1.29 | 2.98 | 480 | 3.03E−03 |
| RS6449326 | 321 | KIAA1276 | 27146 | 4 | 17376059 | 338 | 1.27 | 136 | 1.36 | 2.98 | 472 | 3.03E−03 |
| RS4955346 | 265 | | | 3 | 30879119 | 299 | 1.27 | 159 | 1.36 | 2.98 | 456 | 3.04E−03 |
| RS522071 | 1177 | MGC9850 | 219404 | 13 | 27109580 | 276 | 1.26 | 160 | 1.35 | 2.98 | 434 | 3.04E−03 |
| RS10519370 | 425 | | | 4 | 137332061 | 221 | 1.34 | 275 | 1.26 | 2.97 | 494 | 3.12E−03 |
| RS7467596 | 955 | CRSP8 | 9442 | 9 | 131942232 | 349 | 1.32 | 147 | 1.24 | 2.97 | 494 | 3.12E−03 |
| RS10492139 | 1115 | GRIN2B | 2904 | 12 | 13877862 | 113 | 1.37 | 383 | 1.27 | 2.97 | 494 | 3.12E−03 |
| RS2014357 | 883 | | | 8 | 133172472 | 441 | 1.28 | 53 | 1.41 | 2.97 | 492 | 3.12E−03 |
| RS10512680 | 509 | FLJ39155 | 133584 | 5 | 38307189 | 226 | 1.26 | 232 | 1.35 | 2.97 | 456 | 3.14E−03 |
| RS157819 | 1320 | | | 16 | 75582042 | 252 | 1.27 | 164 | 1.36 | 2.97 | 414 | 3.15E−03 |
| RS2248518 | 991 | C10orf107 | 219621 | 10 | 63181795 | 333 | 1.27 | 167 | 1.35 | 2.96 | 498 | 3.22E−03 |
| RS7827548 | 765 | CSMD1 | 64478 | 8 | 4593724 | 331 | 1.27 | 167 | 1.35 | 2.96 | 496 | 3.22E−03 |
| RS6954168 | 755 | LOC653748 | 653748 | 7 | 153533800 | 489 | 1.29 | 7 | 1.63 | 2.96 | 494 | 3.22E−03 |
| RS1385080 | 1271 | | | 15 | 44513999 | 470 | 1.29 | 20 | 1.5 | 2.96 | 488 | 3.23E−03 |
| RS1443786 | 367 | | | 4 | 83267782 | 338 | 1.28 | 146 | 1.37 | 2.96 | 482 | 3.23E−03 |
| RS10484230 | 1236 | | | 14 | 43700947 | 379 | 1.27 | 105 | 1.37 | 2.96 | 482 | 3.23E−03 |
| RS223128 | 1337 | | | 17 | 26933541 | 320 | 1.27 | 164 | 1.35 | 2.96 | 482 | 3.23E−03 |
| RS7779879 | 743 | | | 7 | 114677634 | 95 | 1.22 | 319 | 1.32 | 2.96 | 412 | 3.25E−03 |
| RS10502185 | 1107 | | | 11 | 113786625 | 468 | 1.29 | 32 | 1.45 | 2.95 | 498 | 3.33E−03 |
| RS10490838 | 263 | | | 3 | 24574382 | 483 | 1.29 | 15 | 1.52 | 2.95 | 496 | 3.33E−03 |
| RS10519443 | 564 | COMMD10 | 51397 | 5 | 115500392 | 470 | 1.28 | 28 | 1.46 | 2.95 | 496 | 3.33E−03 |
| RS10503272 | 763 | CSMD1 | 64478 | 8 | 4592774 | 332 | 1.27 | 166 | 1.35 | 2.95 | 496 | 3.33E−03 |
| RS7675645 | 352 | | | 4 | 59309086 | 410 | 1.28 | 86 | 1.38 | 2.95 | 494 | 3.33E−03 |
| RS950016 | 1244 | | | 14 | 81514393 | 467 | 1.29 | 27 | 1.46 | 2.95 | 492 | 3.33E−03 |
| RS2396821 | 635 | | | 6 | 47183758 | 401 | 1.28 | 89 | 1.38 | 2.95 | 488 | 3.33E−03 |
| RS2981069 | 826 | | | 8 | 70100501 | 426 | 1.28 | 64 | 1.4 | 2.95 | 488 | 3.33E−03 |
| RS9296486 | 616 | PHACTR1 | 221693 | 6 | 12956955 | 401 | 1.32 | 87 | 1.21 | 2.95 | 486 | 3.33E−03 |
| RS10484416 | 657 | | | 6 | 67185561 | 417 | 1.28 | 71 | 1.4 | 2.95 | 486 | 3.33E−03 |
| RS10500585 | 1319 | | | 16 | 72882363 | 347 | 1.32 | 139 | 1.23 | 2.95 | 484 | 3.33E−03 |
| RS7220359 | 1354 | RGS9 | 8787 | 17 | 60614155 | 472 | 1.29 | 14 | 1.53 | 2.95 | 484 | 3.33E−03 |
| RS1037364 | 1344 | YPEL2 | 388403 | 17 | 54792947 | 405 | 1.31 | 71 | 1.2 | 2.95 | 474 | 3.33E−03 |
| RS725882 | 409 | | | 4 | 122925927 | 417 | 1.31 | 51 | 1.18 | 2.95 | 466 | 3.34E−03 |
| RS10488493 | 726 | FLJ45974 | 401337 | 7 | 53543405 | 376 | 1.27 | 124 | 1.37 | 2.94 | 498 | 3.43E−03 |
| RS9298324 | 843 | | | 8 | 80208439 | 417 | 1.28 | 83 | 1.39 | 2.94 | 498 | 3.43E−03 |
| RS9325158 | 1123 | FLJ32942 | 121355 | 12 | 53146448 | 474 | 1.29 | 26 | 1.47 | 2.94 | 498 | 3.43E−03 |
| RS352427 | 816 | | | 8 | 28571996 | 482 | 1.29 | 16 | 1.52 | 2.94 | 496 | 3.44E−03 |
| RS4741021 | 894 | | | 9 | 10237653 | 165 | 1.35 | 333 | 1.27 | 2.94 | 496 | 3.44E−03 |
| RS10505768 | 1112 | | | 12 | 12790297 | 114 | 1.22 | 382 | 1.32 | 2.94 | 494 | 3.44E−03 |
| RS1233775 | 1425 | C20orf133 | 140733 | 20 | 15451543 | 379 | 1.32 | 117 | 1.22 | 2.94 | 494 | 3.44E-03 |
| RS10517281 | 348 | SCFD2 | 152579 | 4 | 53868523 | 366 | 1.27 | 128 | 1.36 | 2.94 | 492 | 3.44E−03 |
| RS10498321 | 1231 | NPAS3 | 64067 | 14 | 33263982 | 433 | 1.28 | 61 | 1.4 | 2.94 | 492 | 3.44E−03 |
| RS2831853 | 1449 | | | 21 | 28781867 | 482 | 1.3 | 10 | 1.02 | 2.94 | 490 | 3.44E−03 |
| RS503699 | 1178 | MGC9850 | 219404 | 13 | 27112734 | 184 | 1.35 | 304 | 1.27 | 2.94 | 486 | 3.44E−03 |
| RS8137239 | 1456 | LOC644802 | 644802 | 22 | 15504963 | 461 | 1.29 | 21 | 1.49 | 2.94 | 480 | 3.44E−03 |
| RS10517799 | 445 | | | 4 | 165398678 | 379 | 1.32 | 101 | 1.22 | 2.94 | 478 | 3.44E−03 |
| RS1154307 | 550 | | | 5 | 111049411 | 424 | 1.29 | 44 | 1.43 | 2.94 | 466 | 3.45E−03 |
| RS10513217 | 305 | SLC9A9 | 285195 | 3 | 144888396 | 163 | 1.36 | 301 | 1.27 | 2.94 | 462 | 3.45E−03 |
| RS10518928 | 1269 | MEIS2 | 4212 | 15 | 35140532 | 367 | 1.32 | 97 | 1.21 | 2.94 | 462 | 3.45E−03 |
| RS1993468 | 1413 | | | 19 | 33195886 | 167 | 1.35 | 249 | 1.26 | 2.94 | 414 | 3.47E−03 |
| RS9283695 | 323 | KIAA0746 | 23231 | 4 | 25462687 | 327 | 1.33 | 173 | 1.24 | 2.93 | 498 | 3.55E−03 |
| RS6829390 | 338 | TEC | 7006 | 4 | 48039914 | 484 | 1.29 | 16 | 1.51 | 2.93 | 498 | 3.55E−03 |
| RS10498681 | 615 | PHACTRI | 221692 | 6 | 12916270 | 464 | 1.31 | 34 | 1.15 | 2.93 | 496 | 3.55E−03 |
| RS1150030 | 959 | | | 10 | 9405319 | 467 | 1.29 | 31 | 1.45 | 2.93 | 496 | 3.55E−03 |
| RS1938887 | 1101 | | | 11 | 99767680 | 71 | 1.2 | 425 | 1.31 | 2.93 | 494 | 3.55E−03 |
| RS979022 | 387 | | | 4 | 105311555 | 260 | 1.26 | 232 | 1.34 | 2.93 | 490 | 3.55E−03 |
| RS1485870 | 453 | LOC442117 | 442117 | 4 | 173125585 | 386 | 1.32 | 100 | 1.22 | 2.93 | 484 | 3.55E−03 |
| RS4696124 | 435 | | | 4 | 153293160 | 233 | 1.26 | 251 | 1.34 | 2.93 | 482 | 3.55E−03 |
| RS2721304 | 559 | | | 5 | 113462331 | 428 | 1.29 | 56 | 1.41 | 2.93 | 482 | 3.55E−03 |
| RS1943752 | 1102 | | | 11 | 100601234 | 354 | 1.27 | 128 | 1.36 | 2.93 | 480 | 3.55E−03 |
| RS7328960 | 1225 | FLJ26443 | 400165 | 13 | 112376717 | 248 | 1.26 | 234 | 1.34 | 2.93 | 480 | 3.55E−03 |
| RS10509209 | 1001 | | | 10 | 66120490 | 243 | 1.26 | 233 | 1.34 | 2.93 | 474 | 3.55E−03 |
| RS10491082 | 1327 | LOC342531 | 342531 | 17 | 6498311 | 279 | 1.27 | 197 | 1.35 | 2.93 | 474 | 3.55E−03 |
| RS10490027 | 237 | KIAA1843 | 84540 | 2 | 210559968 | 373 | 1.29 | 27 | 1.46 | 2.93 | 398 | 3.58E−03 |
| RS1528842 | 209 | | | 2 | 148291308 | 442 | 1.31 | 58 | 1.19 | 2.92 | 498 | 3.66E−03 |
| RS2991463 | 1209 | | | 13 | 78682643 | 134 | 1.36 | 362 | 1.27 | 2.92 | 494 | 3.66E−03 |
| RS1158815 | 482 | | | 4 | 188232341 | 136 | 1.23 | 356 | 1.32 | 2.92 | 490 | 3.66E−03 |
| RS10484317 | 604 | FARS2 | 10667 | 6 | 5614669 | 469 | 1.28 | 23 | 1.47 | 2.92 | 490 | 3.66E−03 |
| RS665889 | 915 | | | 9 | 85011765 | 277 | 1.26 | 213 | 1.34 | 2.92 | 488 | 3.66E−03 |
| RS709228 | 1147 | | | 12 | 91074897 | 343 | 1.27 | 147 | 1.36 | 2.92 | 488 | 3.66E−03 |
| RS10508059 | 1223 | VGCNL1 | 259232 | 13 | 1007320832 | 407 | 1.28 | 81 | 1.38 | 2.92 | 486 | 3.66E−03 |
| RS2103391 | 1154 | CHST11 | 50515 | 12 | 103381740 | 317 | 1.33 | 169 | 1.24 | 2.92 | 484 | 3.66E−03 |
| RS7576837 | 215 | | | 2 | 180945207 | 90 | 1.37 | 394 | 1.27 | 2.92 | 482 | 3.66E−03 |
| RS6974799 | 737 | MAGI2 | 9863 | 7 | 77761741 | 390 | 1.28 | 90 | 1.38 | 2.92 | 478 | 3.67E−03 |
| RS1480757 | 356 | | | 4 | 71398388 | 300 | 1.27 | 172 | 1.36 | 2.92 | 470 | 3.67E−03 |
| RS10502909 | 1393 | | | 18 | 46384530 | 378 | 1.27 | 92 | 1.36 | 2.92 | 468 | 3.67E−03 |
| RS1456196 | 293 | | | 3 | 119137243 | 374 | 1.28 | 86 | 1.38 | 2.92 | 458 | 3.67E−03 |
| RS6537736 | 84 | | | 1 | 112623366 | 395 | 1.32 | 57 | 1.19 | 2.92 | 450 | 3.68E−03 |
| RS959902 | 574 | | | 5 | 121872175 | 304 | 1.32 | 92 | 1.22 | 2.92 | 394 | 3.70E−03 |
| RS2033874 | 138 | | | 2 | 12053486 | 345 | 1.27 | 155 | 1.36 | 2.91 | 498 | 3.78E−03 |
| RS899557 | 595 | | | 5 | 170994216 | 277 | 1.33 | 223 | 1.25 | 2.91 | 498 | 3.78E−03 |
| RS2480014 | 618 | | | 6 | 23021718 | 355 | 1.32 | 145 | 1.24 | 2.91 | 498 | 3.78E−03 |
| RS2166890 | 80 | | | 1 | 104824377 | 354 | 1.27 | 144 | 1.36 | 2.91 | 496 | 3.78E−03 |
| RS6801518 | 307 | | | 3 | 145604317 | 402 | 1.32 | 96 | 1.22 | 2.91 | 496 | 3.78E−03 |
| RS9312699 | 349 | | | 4 | 59216510 | 421 | 1.28 | 77 | 1.39 | 2.91 | 496 | 3.78E−03 |
| RS6956726 | 735 | RSBN1L | 222194 | 7 | 77019497 | 196 | 1.25 | 302 | 1.33 | 2.91 | 496 | 3.78E−03 |
| RS7654796 | 375 | MAPK10 | 5602 | 4 | 87588743 | 200 | 1.34 | 296 | 1.26 | 2.91 | 494 | 3.78E−03 |
| RS10509702 | 1009 | | | 10 | 97914086 | 484 | 1.29 | 12 | 1.55 | 2.91 | 494 | 3.78E−03 |
| RS10512573 | 1356 | | | 17 | 65056574 | 438 | 1.28 | 58 | 1.4 | 2.91 | 494 | 3.78E−03 |
| RS744832 | 191 | | | 2 | 117564871 | 437 | 1.28 | 55 | 1.41 | 2.91 | 490 | 3.78E−03 |
| RS6935765 | 655 | | | 6 | 67179216 | 421 | 1.29 | 71 | 1.4 | 2.91 | 490 | 3.78E−03 |
| RS10518774 | 1282 | UNC13C | 440279 | 15 | 52700466 | 249 | 1.34 | 237 | 1.26 | 2.91 | 484 | 3.78E−03 |
| RS2069837 | 710 | IL6 | 3569 | 7 | 22541267 | 458 | 1.29 | 24 | 1.47 | 2.91 | 480 | 3.78E−03 |
| RS726252 | 90 | PAPPA2 | 60676 | 1 | 173391904 | 303 | 1.27 | 177 | 1.35 | 2.91 | 478 | 3.78E−03 |
| RS717595 | 767 | LOC645986 | 645986 | 8 | 9234995 | 343 | 1.32 | 123 | 1.23 | 2.91 | 464 | 3.79E−03 |
| RS1881014 | 732 | | | 7 | 69770606 | 441 | 1.3 | 17 | 1.52 | 2.91 | 456 | 3.79E−03 |
| RS2458349 | 1105 | | | 11 | 105805096 | 210 | 1.34 | 248 | 1.26 | 2.91 | 456 | 3.79E−03 |
| RS10500985 | 1052 | LUZP2 | 338645 | 11 | 24590527 | 87 | 1.37 | 367 | 1.27 | 2.91 | 452 | 3.79E−03 |
| RS722708 | 1363 | SPIRE1 | 56907 | 18 | 12535581 | 185 | 1.32 | 209 | 1.24 | 2.91 | 392 | 3.82E−03 |
| RS10516773 | 376 | MAPK10 | 5602 | 4 | 87589325 | 202 | 1.34 | 298 | 1.27 | 2.9 | 498 | 3.90E−03 |
| RS6976144 | 734 | RSBN1L | 222194 | 7 | 77019455 | 197 | 1.25 | 303 | 1.33 | 2.9 | 498 | 3.90E−03 |
| RS711088 | 1137 | | | 12 | 76434536 | 292 | 1.33 | 202 | 1.25 | 2.9 | 492 | 3.90E−03 |
| RS2147085 | 37 | | | 1 | 80971158 | 232 | 1.33 | 258 | 1.25 | 2.9 | 488 | 3.90E−03 |
| RS2250756 | 477 | | | 4 | 182095665 | 262 | 1.26 | 188 | 1.35 | 2.9 | 448 | 3.92E−03 |
| RS9310281 | 282 | | | 3 | 73964504 | 339 | 1.27 | 103 | 1.36 | 2.9 | 440 | 3.92E−03 |
| RS10485485 | 1419 | GPR73L1 | 128674 | 20 | 5232380 | 102 | 1.37 | 398 | 1.28 | 2.89 | 498 | 4.02E−03 |
| RS233051 | 42 | DDAH1 | 23576 | 1 | 85550434 | 364 | 1.32 | 132 | 1.23 | 2.89 | 494 | 4.02E−03 |
| RS2725010 | 762 | CSMD1 | 64478 | 8 | 4542585 | 287 | 1.26 | 209 | 1.34 | 2.89 | 494 | 4.02E−03 |
| RS953177 | 823 | DNAJC5B | 85479 | 8 | 67096174 | 470 | 1.29 | 26 | 1.47 | 2.89 | 494 | 4.02E−03 |
| RS10503166 | 756 | DLGAP2 | 9228 | 8 | 1477325 | 60 | 1.4 | 434 | 1.28 | 2.89 | 492 | 4.02E−03 |
| RS7263438 | 1418 | GPR73L1 | 128674 | 20 | 5232251 | 391 | 1.28 | 101 | 1.37 | 2.89 | 490 | 4.02E−03 |
| RS10498835 | 653 | | | 6 | 66572761 | 423 | 1.32 | 65 | 1.2 | 2.89 | 486 | 4.02E−03 |
| RS9319534 | 1321 | WWOX | 51741 | 16 | 77648659 | 309 | 1.33 | 171 | 1.24 | 2.89 | 478 | 4.03E−03 |
| RS9297874 | 884 | | | 8 | 134984532 | 399 | 1.32 | 73 | 1.21 | 2.89 | 470 | 4.03E−03 |
| RS6837953 | 437 | | | 4 | 154288568 | 432 | 1.28 | 36 | 1.42 | 2.89 | 466 | 4.03E−03 |
| RS720613 | 749 | | | 7 | 124046621 | 366 | 1.28 | 98 | 1.38 | 2.89 | 462 | 4.03E−03 |
| RS1830826 | 41 | | | 1 | 83991668 | 443 | 1.31 | 15 | 1.08 | 2.89 | 456 | 4.04E−03 |
| RS802279 | 684 | TCBA1 | 154215 | 6 | 124562146 | 336 | 1.31 | 90 | 1.21 | 2.89 | 424 | 4.05E−03 |
| RS2163120 | 792 | | | 8 | 16165538 | 488 | 1.29 | 12 | 1.54 | 2.88 | 498 | 4.15E−03 |
| RS730837 | 306 | | | 3 | 145584497 | 399 | 1.32 | 93 | 1.22 | 2.88 | 490 | 4.15E−03 |
| RS2138992 | 105 | IL19 | 29949 | 1 | 203382799 | 121 | 1.23 | 363 | 1.32 | 2.88 | 482 | 4.15E−03 |
| RS10501826 | 1097 | | | 11 | 94739512 | 286 | 1.33 | 192 | 1.25 | 2.88 | 476 | 4.16E−03 |
| RS7609812 | 267 | | | 3 | 30885478 | 320 | 1.27 | 156 | 1.36 | 2.88 | 474 | 4.16E−03 |
| RS1298362 | 1136 | | | 12 | 74493708 | 225 | 1.25 | 251 | 1.33 | 2.88 | 474 | 4.16E−03 |
| RS1485871 | 454 | LOC442117 | 442117 | 4 | 173125753 | 377 | 1.32 | 91 | 1.22 | 2.88 | 466 | 4.16E−03 |
| RS10509757 | 1012 | CNNM2 | 54805 | 10 | 104742950 | 302 | 1.33 | 164 | 1.25 | 2.88 | 464 | 4.16E−03 |
| RS10497017 | 208 | | | 2 | 148275544 | 418 | 1.32 | 46 | 1.18 | 2.88 | 462 | 4.16E−03 |
| RS9284299 | 1277 | UNC13C | 440279 | 15 | 52685923 | 115 | 1.36 | 285 | 1.27 | 2.88 | 398 | 4.19E−03 |
| RS10498212 | 249 | IRS1 | 3667 | 2 | 227476780 | 482 | 1.3 | 18 | 1.1 | 2.87 | 498 | 4.28E−03 |
| RS10507930 | 1212 | | | 13 | 82396265 | 494 | 1.29 | 6 | 1.65 | 2.87 | 498 | 4.28E−03 |
| RS1901439 | 204 | | | 2 | 134271203 | 440 | 1.28 | 58 | 1.4 | 2.87 | 496 | 4.28E−03 |
| RS10520494 | 478 | | | 4 | 182747335 | 426 | 1.28 | 72 | 1.39 | 2.87 | 496 | 4.28E−03 |
| RS696428 | 1139 | | | 12 | 76454956 | 293 | 1.33 | 203 | 1.25 | 2.87 | 494 | 4.28E−03 |
| RS770123 | 1140 | NAV3 | 89795 | 12 | 76926472 | 310 | 1.33 | 186 | 1.25 | 2.87 | 494 | 4.28E−03 |
| RS1924794 | 1191 | | | 13 | 47173413 | 283 | 1.27 | 213 | 1.34 | 2.87 | 494 | 4.28E−03 |
| RS4617036 | 729 | FLJ10099 | 55069 | 7 | 65859759 | 345 | 1.32 | 149 | 1.24 | 2.87 | 492 | 4.28E−03 |
| RS943345 | 1007 | SORBS1 | 10580 | 10 | 97240620 | 83 | 1.38 | 411 | 1.28 | 2.87 | 492 | 4.28E−03 |
| RS7874576 | 896 | | | 9 | 12600410 | 487 | 1.29 | 5 | 1.68 | 2.87 | 490 | 4.28E−03 |
| RS917022 | 393 | COL25A1 | 84570 | 4 | 110557948 | 429 | 1.31 | 61 | 1.2 | 2.87 | 488 | 4.28E−03 |
| RS2913260 | 529 | SV2C | 22987 | 5 | 75644923 | 424 | 1.31 | 66 | 1.2 | 2.87 | 488 | 4.28E−03 |
| RS10491705 | 887 | | | 9 | 2259108 | 423 | 1.31 | 67 | 1.2 | 2.87 | 488 | 4.28E−03 |
| RS6740690 | 205 | | | 2 | 134611767 | 243 | 1.26 | 243 | 1.34 | 2.87 | 484 | 4.28E−03 |
| RS297574 | 865 | | | 8 | 96256279 | 120 | 1.37 | 342 | 1.28 | 2.87 | 460 | 4.29E−03 |
| RS9317744 | 1176 | | | 13 | 22963766 | 451 | 1.3 | 11 | 1.56 | 2.87 | 460 | 4.29E−03 |
| RS1959736 | 1245 | | | 14 | 82487626 | 51 | 1.41 | 407 | 1.28 | 2.87 | 456 | 4.30E−03 |
| RS10516114 | 600 | | | 5 | 173638652 | 463 | 1.31 | 37 | 1.16 | 2.86 | 498 | 4.41E−03 |
| RS7465623 | 877 | | | 8 | 119372441 | 116 | 1.37 | 384 | 1.28 | 2.86 | 498 | 4.41E−03 |
| RS10498292 | 1229 | | | 14 | 27284462 | 413 | 1.28 | 87 | 1.38 | 2.86 | 498 | 4.41E−03 |
| RS2964299 | 588 | | | 5 | 165876275 | 478 | 1.31 | 20 | 1.11 | 2.86 | 496 | 4.42E−03 |
| RS10506524 | 1124 | MSRB3 | 253827 | 12 | 64070379 | 480 | 1.29 | 18 | 1.5 | 2.86 | 496 | 4.42E−03 |
| RS1216987 | 1189 | | | 13 | 46240774 | 461 | 1.29 | 37 | 1.43 | 2.86 | 496 | 4.42E−03 |
| RS10511294 | 289 | | | 3 | 112534708 | 394 | 1.32 | 102 | 1.22 | 2.86 | 494 | 4.42E−03 |
| RS10503273 | 764 | CSMD1 | 64478 | 8 | 4592896 | 330 | 1.27 | 166 | 1.35 | 2.86 | 494 | 4.42E−03 |
| RS438548 | 1210 | | | 13 | 81272799 | 447 | 1.31 | 49 | 1.18 | 2.86 | 494 | 4.42E−03 |
| RS2111826 | 309 | CLDN11 | 5010 | 3 | 171623548 | 455 | 1.31 | 39 | 1.16 | 2.86 | 492 | 4.42E−03 |
| RS4521277 | 266 | | | 3 | 30879801 | 171 | 1.35 | 321 | 1.27 | 2.86 | 490 | 4.42E−03 |
| RS10514263 | 545 | EDIL3 | 10085 | 5 | 83426017 | 474 | 1.29 | 18 | 1.49 | 2.86 | 490 | 4.42E−03 |
| RS10489920 | 66 | PAP2D | 163404 | 1 | 99146514 | 436 | 1.28 | 52 | 1.41 | 2.86 | 486 | 4.42E−03 |
| RS9327178 | 568 | | | 5 | 120387547 | 202 | 1.34 | 286 | 1.26 | 2.86 | 486 | 4.42E−03 |
| RS883025 | 935 | RGS3 | 5998 | 9 | 113405053 | 386 | 1.31 | 100 | 1.21 | 2.86 | 484 | 4.42E−03 |
| RS4767227 | 1157 | | | 12 | 113050998 | 194 | 1.25 | 282 | 1.34 | 2.86 | 474 | 4.42E−03 |
| RS9318391 | 1202 | | | 13 | 75517111 | 381 | 1.28 | 67 | 1.39 | 2.86 | 446 | 4.44E−03 |
| RS1916411 | 997 | | | 10 | 65340839 | 222 | 1.25 | 222 | 1.33 | 2.86 | 442 | 4.44E−03 |
| RS7023082 | 910 | | | 9 | 83559554 | 250 | 1.33 | 176 | 1.25 | 2.86 | 424 | 4.45E−03 |
| RS1996970 | 173 | SALF | 286749 | 2 | 48710134 | 316 | 1.28 | 88 | 1.38 | 2.86 | 402 | 4.46E−03 |

[0175] TABLE 3
SNP markers with P-value less than 0.005 for HDL from F-test (one-way ANOVA).
Alleles are codes as 1 = A, 2 = C, 3 = G, and 4 = T. For each group number of
observations ‘n’ and average value ‘avg’ are presented.

| RS_id | SEQ_ID_no | Gene | Gene_id | Chr | Position | g1 | n1 |
|---|---|---|---|---|---|---|---|
| RS1410126 | 687 | C6orf103 | 79747 | 6 | 147125370 | 1/1 | 5 |
| RS10498321 | 1231 | NPAS3 | 64067 | 14 | 33263982 | 1/1 | 187 |
| RS744832 | 191 | | | 2 | 117564871 | 1/1 | 1 |
| RS10485909 | 738 | MAGI2 | 9863 | 7 | 77884399 | 2/2 | 227 |
| RS2195989 | 872 | ANGPT1 | 284 | 8 | 108555088 | 2/2 | 9 |
| RS1399503 | 1159 | | | 12 | 127163861 | 3/3 | 204 |
| RS4102401 | 866 | RRM2B | 50484 | 8 | 103288416 | 2/2 | 1 |
| RS10518533 | 420 | | | 4 | 129815863 | 1/1 | 5 |
| RS10504433 | 824 | | | 8 | 70021434 | 2/2 | 196 |
| RS10516418 | 384 | | | 4 | 98106087 | 1/1 | 213 |
| RS2230133 | 580 | TAF7 | 6879 | 5 | 140679241 | 2/2 | 205 |
| RS10498260 | 253 | MGC42174 | 129563 | 2 | 232882126 | 1/1 | 1 |
| RS10486467 | 712 | | | 7 | 26427754 | 1/1 | 1 |
| RS2120650 | 1292 | | | 15 | 84419700 | 1/1 | 223 |
| RS1467596 | 605 | FLJ33708 | 285780 | 6 | 6360933 | 1/1 | 1 |
| RS2170398 | 773 | | | 8 | 13592708 | 2/2 | 1 |
| RS352766 | 775 | | | 8 | 15688930 | 2/2 | 1 |
| RS10488888 | 395 | | | 4 | 111641312 | 2/2 | 1 |
| RS4960221 | 606 | LY86 | 9450 | 6 | 6547432 | 2/2 | 186 |
| RS10494066 | 81 | NTNG1 | 22854 | 1 | 107501550 | 2/2 | 6 |
| RS10517155 | 330 | | | 4 | 28879822 | 2/2 | 1 |
| RS9303878 | 1360 | | | 18 | 1564764 | 1/1 | 202 |
| RS10510995 | 281 | | | 3 | 70525819 | 1/1 | 1 |
| RS718759 | 575 | | | 5 | 125467810 | 2/2 | 1 |
| RS1480145 | 796 | | | 8 | 16181494 | 2/2 | 238 |
| RS10485110 | 682 | | | 6 | 116309557 | 3/3 | 6 |
| RS1902049 | 154 | LTBP1 | 4052 | 2 | 33281233 | 3/3 | 136 |
| RS2235216 | 683 | | | 6 | 116310188 | 1/1 | 6 |
| RS470559 | 1399 | MBP | 4155 | 18 | 72887390 | 2/2 | 3 |
| RS10503573 | 780 | MSR1 | 4481 | 8 | 16047855 | 1/1 | 236 |
| RS2854946 | 1259 | SERPINAS | 5104 | 14 | 94118132 | 2/2 | 13 |
| RS4631686 | 3 | | | 1 | 14322780 | 1/3 | 8 |
| RS6954679 | 728 | | | 7 | 62940814 | 1/1 | 207 |
| RS866651 | 262 | THRB | 7068 | 3 | 24237159 | 2/2 | 167 |
| RS2255565 | 194 | | | 2 | 118114732 | 1/1 | 191 |
| RS10483988 | 1250 | GALC | 2581 | 14 | 87504310 | 2/2 | 178 |
| RS387661 | 587 | GABRG2 | 2566 | 5 | 161476289 | 2/2 | 2 |
| RS2029259 | 484 | | | 4 | 188422292 | 1/1 | 194 |
| RS2113515 | 195 | | | 2 | 118115019 | 2/2 | 187 |
| RS10503586 | 803 | | | 8 | 16792998 | 1/1 | 232 |
| RS285406 | 855 | | | 8 | 87094129 | 2/2 | 228 |
| RS6811055 | 336 | | | 4 | 46732838 | 2/2 | 75 |
| RS397618 | 1063 | TMEM16C | 63982 | 11 | 26546754 | 2/2 | 236 |
| RS896990 | 251 | MGC42174 | 129563 | 2 | 232714361 | 1/1 | 3 |
| RS250387 | 518 | ARL15 | 54622 | 5 | 53620394 | 1/1 | 172 |
| RS9299445 | 993 | LOC644954 | 644954 | 10 | 63244794 | 2/2 | 206 |
| RS10516673 | 370 | HNRPD | 3184 | 4 | 83635972 | 1/1 | 237 |
| RS10520350 | 472 | | | 4 | 177769342 | 2/2 | 1 |
| RS9299446 | 994 | LOC644954 | 644954 | 10 | 63244886 | 1/1 | 3 |
| RS2170116 | 791 | | | 8 | 16157007 | 2/2 | 231 |
| RS4888946 | 1324 | | | 16 | 77874931 | 1/1 | 177 |
| RS10495783 | 155 | LTBP1 | 4052 | 2 | 33313283 | 2/2 | 50 |
| RS10516834 | 378 | | | 4 | 90629156 | 1/1 | 3 |
| RS2207139 | 645 | | | 6 | 50953449 | 2/2 | 8 |
| RS8054578 | 1323 | | | 16 | 77874316 | 1/1 | 3 |
| RS7897958 | 987 | BICC1 | 80114 | 10 | 60121804 | 1/1 | 6 |
| RS1121640 | 1099 | | | 11 | 96694636 | 2/2 | 218 |
| RS10493425 | 9 | | | 1 | 67722148 | 1/1 | 216 |
| RS965158 | 868 | | | 8 | 107564094 | 2/4 | 11 |
| RS10482871 | 1439 | | | 21 | 15700259 | 2/3 | 5 |
| RS10503572 | 789 | | | 8 | 16131101 | 1/3 | 5 |
| RS9316436 | 1168 | EFHA1 | 221154 | 13 | 21000655 | 2/2 | 183 |
| RS812800 | 1338 | | | 17 | 30646887 | 1/1 | 9 |
| RS10508377 | 962 | | | 10 | 10107183 | 1/1 | 218 |
| RS10500985 | 1052 | LUZP2 | 338645 | 11 | 24590527 | 1/1 | 6 |
| RS3116231 | 252 | MGC42174 | 129563 | 2 | 232717788 | 2/2 | 2 |
| RS1490125 | 651 | | | 6 | 66451580 | 3/3 | 181 |
| RS8049647 | 1310 | | | 16 | 50695297 | 1/1 | 166 |
| RS10517562 | 436 | | | 4 | 153393348 | 1/1 | 24 |
| RS2222654 | 430 | | | 4 | 137363666 | 1/1 | 77 |
| RS2357344 | 1242 | SYNE2 | 23224 | 14 | 63578006 | 2/2 | 5 |
| RS4869279 | 547 | | | 5 | 95654674 | 2/2 | 168 |
| RS11232919 | 1087 | LOC646176 | 646176 | 11 | 81284714 | 2/2 | 2 |
| RS9315157 | 1181 | 13CDNA73 | 10129 | 13 | 31642352 | 1/1 | 6 |
| RS1675904 | 695 | | | 6 | 154399717 | 2/2 | 204 |
| RS1502887 | 358 | FRAS1 | 80144 | 4 | 79340562 | 2/2 | 207 |
| RS1380835 | 1390 | | | 18 | 39747045 | 3/3 | 182 |
| RS10509764 | 1013 | CNNM2 | 54805 | 10 | 104766465 | 2/2 | 126 |
| RS10514450 | 1322 | | | 16 | 77874213 | 2/2 | 3 |
| RS2101435 | 254 | MGC42174 | 129563 | 2 | 232940663 | 2/2 | 191 |
| RS9308931 | 156 | LTBP1 | 4052 | 2 | 33333348 | 1/1 | 65 |
| RS2290547 | 272 | HYPB | 29072 | 3 | 47036187 | 1/1 | 13 |
| RS10504709 | 848 | | | 8 | 80781919 | 1/1 | 16 |
| RS10521979 | 1461 | DMD | 1756 | X | 31547276 | 3/3 | 41 |
| RS10496647 | 202 | | | 2 | 126205166 | 1/1 | 1 |
| RS8076457 | 1328 | NTN1 | 9423 | 17 | 8884654 | 2/2 | 169 |
| RS297733 | 1417 | | | 20 | 4357955 | 3/3 | 160 |
| RS10513319 | 952 | | | 9 | 117781003 | 1/1 | 233 |
| RS10496649 | 203 | | | 2 | 126293622 | 2/2 | 207 |
| RS9325158 | 1123 | FLJ32942 | 121355 | 12 | 53146448 | 2/2 | 1 |
| RS1817186 | 319 | | | 4 | 14843817 | 2/2 | 197 |
| RS346421 | 527 | | | 5 | 62565739 | 3/3 | 201 |
| RS3770899 | 163 | CRIM1 | 51232 | 2 | 36566423 | 1/1 | 1 |
| RS10506790 | 1141 | | | 12 | 77762475 | 1/1 | 2 |
| RS1749541 | 57 | ABCD3 | 5825 | 1 | 94670399 | 2/2 | 116 |
| RS1935229 | 1 | CAMTA1 | 23261 | 1 | 7695267 | 2/4 | 33 |
| RS250388 | 519 | ARL15 | 54622 | 5 | 53621019 | 1/1 | 6 |
| RS4073625 | 292 | | | 3 | 118628997 | 2/2 | 3 |
| RS4770403 | 1173 | SGCG | 6445 | 13 | 22653127 | 1/1 | 2 |
| RS2157768 | 1340 | | | 17 | 49582892 | 1/1 | 233 |
| RS10514844 | 1182 | | | 13 | 37808480 | 2/3 | 7 |
| RS10484205 | 1237 | | | 14 | 48644630 | 1/1 | 15 |
| RS7897663 | 1015 | NT5C2 | 22978 | 10 | 104895594 | 1/1 | 123 |
| RS2278016 | 1308 | | | 16 | 50674510 | 2/2 | 6 |
| RS9303347 | 1342 | | | 17 | 49585177 | 1/1 | 1 |
| RS1011439 | 1339 | | | 17 | 49582464 | 1/1 | 1 |
| RS10494663 | 94 | | | 1 | 188507735 | 1/1 | 5 |
| RS3218491 | 753 | XRCC2 | 7516 | 7 | 151791396 | 2/4 | 6 |
| RS1527420 | 196 | | | 2 | 119267521 | 1/1 | 183 |
| RS10509929 | 1021 | | | 10 | 112482278 | 2/2 | 3 |
| RS10508378 | 961 | | | 10 | 10085297 | 2/2 | 1 |
| RS2413809 | 1270 | | | 15 | 44497210 | 2/2 | 102 |
| RS10508940 | 986 | PRKG1 | 5592 | 10 | 52888932 | 2/2 | 160 |
| RS9284617 | 361 | FRAS1 | 80144 | 4 | 79349747 | 1/3 | 41 |
| RS788005 | 232 | | | 2 | 198059567 | 2/2 | 144 |
| RS2056247 | 1092 | | | 11 | 93315872 | 3/3 | 8 |
| RS10495774 | 150 | | | 2 | 30418327 | 2/2 | 11 |
| RS10484317 | 604 | FARS2 | 10667 | 6 | 5614669 | 2/2 | 225 |
| RS10517496 | 353 | | | 4 | 61091463 | 2/2 | 2 |
| RS10485111 | 681 | | | 6 | 116299831 | 2/2 | 186 |
| RS2748324 | 658 | | | 6 | 71789087 | 2/2 | 209 |
| RS4405428 | 1213 | GPC5 | 2262 | 13 | 91916519 | 2/2 | 190 |
| RS1044045 | 1167 | EFHA1 | 221154 | 13 | 20965072 | 1/1 | 165 |
| RS176435 | 680 | | | 6 | 103636845 | 2/2 | 179 |
| RS10513351 | 953 | | | 9 | 119606328 | 3/3 | 67 |
| RS3766988 | 91 | CACNA1E | 777 | 1 | 178398940 | 2/2 | 8 |
| RS8068574 | 1343 | | | 17 | 50327246 | 1/1 | 151 |
| RS10483457 | 1232 | GARNL1 | 253959 | 14 | 35211683 | 1/1 | 217 |
| RS879780 | 1109 | APLP2 | 334 | 11 | 129513314 | 2/2 | 1 |
| RS10513301 | 943 | ASTN2 | 23245 | 9 | 117241331 | 2/2 | 173 |
| RS4121693 | 1108 | | | 11 | 121613919 | 2/2 | 24 |
| RS10508059 | 1223 | VGCNL1 | 259232 | 13 | 100730832 | 2/2 | 171 |
| RS1878144 | 193 | | | 2 | 117895419 | 3/3 | 187 |
| RS10517504 | 354 | | | 4 | 61173582 | 1/1 | 2 |
| RS1356216 | 192 | | | 2 | 117878791 | 3/3 | 195 |
| RS2127258 | 566 | | | 5 | 117512842 | 2/2 | 3 |
| RS1226489 | 634 | GPR110 | 266977 | 6 | 47100017 | 2/2 | 1 |
| RS877984 | 1088 | DLG2 | 1740 | 11 | 83257468 | 1/1 | 48 |
| RS6735220 | 229 | HECW2 | 57520 | 2 | 197080992 | 2/2 | 207 |
| RS3745718 | 1414 | CARD8 | 22900 | 19 | 53406965 | 1/1 | 77 |
| RS9303346 | 1341 | | | 17 | 49583384 | 1/1 | 1 |
| RS877345 | 958 | TAF3 | 83860 | 10 | 8093782 | 1/1 | 186 |
| RS973916 | 892 | | | 9 | 9842432 | 2/2 | 170 |
| RS1371077 | 1144 | | | 12 | 89049534 | 2/2 | 180 |
| RS1013401 | 643 | | | 6 | 48502893 | 1/1 | 85 |
| RS33375 | 598 | | | 5 | 170998718 | 1/1 | 6 |
| RS10490353 | 172 | UNQ6975 | 400952 | 2 | 45328245 | 2/2 | 203 |
| RS10517616 | 441 | | | 4 | 156733549 | 2/2 | 110 |
| RS716224 | 1179 | | | 13 | 27160986 | 1/1 | 5 |
| RS10497783 | 230 | HECW2 | 57520 | 2 | 197081030 | 1/1 | 2 |
| RS9304301 | 1391 | | | 18 | 40017390 | 2/2 | 226 |
| RS4646981 | 1106 | NCAM1 | 4684 | 11 | 112596015 | 1/3 | 10 |
| RS1535053 | 602 | | | 6 | 126089 | 1/1 | 130 |
| RS4146127 | 350 | | | 4 | 59260295 | 1/1 | 168 |
| RS10519371 | 426 | | | 4 | 137332410 | 3/3 | 69 |
| RS10509698 | 1008 | C10orf130 | 387707 | 10 | 97782342 | 1/1 | 1 |
| RS3218177 | 4 | E2F2 | 1870 | 1 | 23590594 | 1/1 | 1 |
| RS7577835 | 233 | | | 2 | 198203562 | 2/2 | 10 |
| RS9312013 | 260 | | | 3 | 8299589 | 3/3 | 223 |
| RS10500668 | 1039 | | | 11 | 6285001 | 2/2 | 1 |
| RS2670607 | 201 | | | 2 | 124113865 | 1/1 | 3 |
| RS1550740 | 1122 | | | 12 | 44813534 | 2/2 | 1 |
| RS6990997 | 867 | ZEPM2 | 23414 | 8 | 106881703 | 2/2 | 6 |
| RS10506265 | 1121 | | | 12 | 44802761 | 2/2 | 1 |
| RS10487745 | 746 | TAS2R16 | 50833 | 7 | 122228360 | 1/1 | 2 |
| RS10494664 | 95 | | | 1 | 188509177 | 1/1 | 184 |
| RS10509702 | 1009 | | | 10 | 97914086 | 1/1 | 237 |
| RS4793547 | 1358 | | | 17 | 66843227 | 2/2 | 36 |
| RS4131522 | 1153 | | | 12 | 102453596 | 2/2 | 220 |
| RS7536312 | 93 | | | 1 | 188459017 | 1/1 | 5 |
| RS1428250 | 508 | | | 5 | 38252169 | 1/1 | 218 |
| RS7718000 | 551 | | | 5 | 112998258 | 1/3 | 5 |
| RS2371319 | 268 | | | 3 | 40701948 | 2/2 | 2 |
| RS10516142 | 601 | FLT4 | 2324 | 5 | 180003769 | 2/2 | 243 |
| RS7597348 | 250 | | | 2 | 232194410 | 2/2 | 29 |
| RS10509161 | 996 | LOC644954 | 644954 | 10 | 63245347 | 1/1 | 2 |
| RS2827082 | 1444 | | | 21 | 22119060 | 2/2 | 5 |
| RS10491068 | 1011 | BLNK | 29760 | 10 | 97946892 | 2/2 | 236 |
| RS190788 | 1221 | | | 13 | 97587028 | 2/2 | 233 |
| RS1023431 | 1464 | GLA | 2717 | X | 100463954 | 3/3 | 214 |
| RS113318 | 548 | PCSK1 | 5122 | 5 | 95767236 | 2/2 | 3 |
| RS4131441 | 283 | CNTN3 | 5067 | 3 | 74561538 | 1/1 | 16 |
| RS1275637 | 1135 | | | 12 | 74445115 | 2/2 | 178 |
| RS953681 | 1442 | | | 21 | 20509158 | 1/1 | 191 |
| RS381765 | 363 | FRAS1 | 80144 | 4 | 79616778 | 2/2 | 232 |
| RS1226491 | 633 | GPR110 | 266977 | 6 | 47097807 | 1/1 | 1 |
| RS10509119 | 988 | ANK3 | 288 | 10 | 61482646 | 1/1 | 200 |
| RS6988377 | 885 | | | 8 | 137390100 | 1/1 | 4 |
| RS7665090 | 385 | | | 4 | 103908806 | 2/2 | 57 |
| RS10509160 | 995 | LOC644954 | 644954 | 10 | 63245218 | 2/2 | 2 |
| RS1332925 | 969 | C10orf112 | 340895 | 10 | 19836964 | 1/1 | 214 |
| RS10516867 | 380 | MGC48628 | 401145 | 4 | 91569270 | 1/1 | 1 |
| RS9285122 | 1183 | | | 13 | 37809901 | 2/4 | 8 |
| RS2150468 | 1184 | UFM1 | 51569 | 13 | 37825888 | 3/3 | 241 |
| RS9284616 | 360 | FRAS1 | 80144 | 4 | 79349710 | 2/2 | 208 |
| RS2969001 | 423 | | | 4 | 131140397 | 2/2 | 93 |
| RS7794555 | 754 | LOC653748 | 653748 | 7 | 153481879 | 2/2 | 214 |
| RS10495785 | 158 | LTBP1 | 4052 | 2 | 33472748 | 1/1 | 193 |
| RS10492506 | 1192 | CDADC1 | 81602 | 13 | 48722637 | 2/2 | 1 |
| RS723043 | 157 | LTBP1 | 4052 | 2 | 33453438 | 3/3 | 69 |
| RS2323936 | 1186 | | | 13 | 38001773 | 2/4 | 8 |
| RS2323937 | 1187 | | | 13 | 38001927 | 1/1 | 242 |
| RS1851006 | 1278 | UNC13C | 440279 | 15 | 52691684 | 2/2 | 45 |
| RS10509705 | 1010 | | | 10 | 97914784 | 2/2 | 1 |
| RS10517294 | 333 | | | 4 | 33603028 | 1/1 | 215 |
| RS6727480 | 231 | | | 2 | 197969377 | 2/2 | 18 |
| RS2169942 | 565 | | | 5 | 117512644 | 1/1 | 206 |
| RS10499227 | 686 | LOC645492 | 645492 | 6 | 142224151 | 1/1 | 9 |
| RS1577879 | 34 | | | 1 | 80924966 | 2/2 | 163 |
| RS1029233 | 1452 | | | 21 | 32327571 | 1/1 | 23 |
| RS7571668 | 178 | FLJ16124 | 440867 | 2 | 66198829 | 2/2 | 106 |
| RS10514845 | 1185 | | | 13 | 37910815 | 3/4 | 8 |
| RS4775359 | 1287 | RORA | 6095 | 15 | 59175796 | 2/2 | 195 |
| RS1889226 | 900 | KIAA1797 | 54914 | 9 | 20670198 | 2/2 | 219 |
| RS10517865 | 447 | | | 4 | 167008621 | 2/2 | 184 |
| RS10516865 | 379 | | | 4 | 91462479 | 3/3 | 245 |
| RS1004246 | 1405 | | | 19 | 16317260 | 1/1 | 93 |
| RS10510714 | 270 | | | 3 | 40736947 | 1/1 | 233 |
| RS4143188 | 1143 | C12orf26 | 84190 | 12 | 81305253 | 1/1 | 1 |
| RS340686 | 500 | | | 5 | 8440200 | 2/2 | 154 |
| RS10486650 | 713 | AAA1 | 404744 | 7 | 34413725 | 1/1 | 1 |
| RS10499017 | 676 | | | 6 | 98831359 | 2/2 | 92 |
| RS10517183 | 337 | GABRB1 | 2560 | 4 | 47209761 | 2/2 | 8 |
| RS10494826 | 98 | LOC647219 | 647219 | 1 | 197817653 | 2/2 | 11 |
| RS2254162 | 774 | | | 8 | 14632707 | 1/1 | 12 |
| RS1887889 | 905 | PGM5 | 5239 | 9 | 68275512 | 2/2 | 90 |
| RS1013459 | 1362 | GNAL | 2774 | 18 | 11690534 | 1/1 | 211 |
| RS4128923 | 461 | ADAM29 | 11086 | 4 | 176264705 | 2/2 | 3 |
| RS2072506 | 722 | AMPH | 273 | 7 | 38275635 | 1/1 | 214 |
| RS2034022 | 1396 | DOK6 | 220164 | 18 | 65341066 | 2/2 | 97 |
| RS924993 | 880 | | | 8 | 128373681 | 1/1 | 1 |
| RS10506869 | 1142 | | | 12 | 81247449 | 2/2 | 1 |
| RS10505540 | 882 | CCDC26 | 137196 | 8 | 130592619 | 2/2 | 1 |
| RS265056 | 383 | UNC5C | 8633 | 4 | 96755318 | 2/2 | 211 |
| RS10495520 | 124 | | | 2 | 5537475 | 2/2 | 4 |
| RS6856098 | 331 | PCDH7 | 5099 | 4 | 30797074 | 2/2 | 11 |
| RS10503419 | 771 | | | 8 | 11164210 | 1/1 | 157 |
| RS439269 | 897 | | | 9 | 14481347 | 2/2 | 196 |
| RS720327 | 382 | | | 4 | 92066267 | 1/1 | 213 |
| RS10513299 | 941 | ASTN2 | 23245 | 9 | 117184531 | 1/1 | 185 |
| RS1917952 | 429 | | | 4 | 137355240 | 2/2 | 75 |
| RS10483252 | 1226 | | | 14 | 21052193 | 2/2 | 1 |
| RS6733858 | 225 | | | 2 | 190290242 | 1/1 | 81 |
| RS1429130 | 432 | | | 4 | 148581368 | 1/1 | 209 |
| RS3118650 | 1194 | | | 13 | 49927325 | 1/1 | 234 |
| RS1959736 | 1245 | | | 14 | 82487626 | 3/3 | 8 |
| RS10511852 | 903 | | | 9 | 30227951 | 2/2 | 231 |
| RS10508692 | 970 | GPR158 | 57512 | 10 | 25677276 | 2/3 | 5 |
| RS2147085 | 37 | | | 1 | 80971158 | 1/1 | 51 |
| RS4611835 | 313 | NAALADL2 | 254827 | 3 | 176610777 | 1/1 | 2 |
| RS715428 | 1365 | KIAA1772 | 80000 | 18 | 17131449 | 1/2 | 12 |
| RS10516872 | 381 | MGC48628 | 401145 | 4 | 91681918 | 1/1 | 218 |
| RS9323955 | 1265 | VRK1 | 7443 | 14 | 96364688 | 1/1 | 56 |
| RS1844510 | 1241 | KCNH5 | 27133 | 14 | 62287241 | 1/1 | 64 |
| RS1204014 | 747 | TAS2R16 | 50833 | 7 | 122228794 | 2/2 | 228 |
| RS2785949 | 1195 | | | 13 | 53806676 | 1/1 | 124 |
| RS2721304 | 559 | | | 5 | 113462331 | 1/1 | 186 |
| RS10508096 | 1224 | BIVM | 54841 | 13 | 102258865 | 2/2 | 6 |
| RS10510100 | 1029 | | | 10 | 123456734 | 2/2 | 233 |
| RS9287120 | 96 | | | 1 | 188558913 | 2/2 | 5 |
| RS1818711 | 1279 | UNC13C | 440279 | 15 | 52692074 | 1/1 | 80 |
| RS10497689 | 224 | | | 2 | 188708247 | 1/3 | 5 |
| RS10492139 | 1115 | GRIN2B | 2904 | 12 | 13877862 | 2/2 | 14 |
| RS3886738 | 992 | LOC644954 | 644954 | 10 | 63234254 | 1/1 | 2 |
| RS10494214 | 85 | | | 1 | 119041077 | 2/2 | 205 |
| RS6798797 | 271 | | | 3 | 40741966 | 1/1 | 229 |
| RS935313 | 1266 | | | 15 | 27377574 | 1/1 | 52 |
| RS1464452 | 443 | | | 4 | 157951744 | 1/1 | 7 |
| RS2277456 | 1238 | PYGL | 5836 | 14 | 50447627 | 2/2 | 181 |
| RS1367719 | 1447 | | | 21 | 27974532 | 1/1 | 124 |
| RS7752110 | 620 | | | 6 | 23138143 | 2/2 | 9 |
| RS4918842 | 1023 | HABP2 | 3026 | 10 | 115306802 | 2/2 | 9 |
| RS1025748 | 438 | | | 4 | 154921502 | 1/1 | 154 |
| RS10514770 | 151 | | | 2 | 30524090 | 1/1 | 104 |
| RS1442799 | 1298 | | | 15 | 96589992 | 2/2 | 215 |
| RS2405708 | 428 | | | 4 | 137339327 | 1/1 | 51 |
| RS7413158 | 53 | GBP2 | 2634 | 1 | 89292717 | 1/1 | 6 |
| RS1407466 | 889 | | | 9 | 7958548 | 1/1 | 165 |
| RS2254764 | 1450 | GRIK1 | 2897 | 21 | 30131325 | 3/3 | 3 |
| RS539254 | 836 | | | 8 | 80079448 | 1/1 | 139 |
| RS2333821 | 170 | LOC646790 | 646790 | 2 | 44288177 | 2/2 | 112 |
| RS1016579 | 881 | | | 8 | 129269143 | 1/1 | 2 |
| RS10484518 | 698 | | | 6 | 164232489 | 3/3 | 25 |
| RS6989370 | 770 | | | 8 | 10653990 | 2/2 | 58 |
| RS10505777 | 1113 | | | 12 | 13378527 | 2/2 | 175 |
| RS717806 | 160 | | | 2 | 36487186 | 1/1 | 11 |
| RS1577302 | 968 | C10orf112 | 340895 | 10 | 19690726 | 2/2 | 6 |
| RS1869733 | 822 | FAM77D | 286183 | 8 | 63970954 | 2/2 | 161 |
| RS1217656 | 759 | CSMD1 | 64478 | 8 | 4293171 | 1/1 | 1 |
| RS2838000 | 1455 | BACE2 | 25825 | 21 | 41568388 | 1/1 | 20 |
| RS6741304 | 175 | LOC400954 | 400954 | 2 | 55099846 | 2/2 | 25 |
| RS2223163 | 1438 | | | 21 | 15149849 | 2/2 | 14 |
| RS4952999 | 169 | PLEKHH2 | 130271 | 2 | 43841904 | 1/1 | 39 |
| RS2973237 | 334 | | | 4 | 37294256 | 2/2 | 28 |
| RS3124806 | 2 | CAMTA1 | 23261 | 1 | 7703744 | 1/3 | 26 |
| RS1485870 | 453 | LOC442117 | 442117 | 4 | 173125585 | 2/2 | 157 |
| RS10518405 | 413 | | | 4 | 123937959 | 1/1 | 2 |
| RS10497650 | 223 | | | 2 | 185048541 | 2/4 | 5 |
| RS10488693 | 1083 | C11orf11 | 747 | 11 | 61241732 | 1/3 | 23 |
| RS10507082 | 1148 | | | 12 | 96255332 | 1/1 | 14 |
| RS10510715 | 269 | | | 3 | 40714716 | 2/2 | 2 |
| RS4684321 | 256 | | | 3 | 1842614 | 1/1 | 227 |
| RS829612 | 152 | | | 2 | 30542738 | 2/2 | 33 |
| RS10489925 | 67 | PAP2D | 163404 | 1 | 99173344 | 2/2 | 10 |
| RS735403 | 386 | MANBA | 4126 | 4 | 103910746 | 1/1 | 59 |
| RS2217486 | 489 | | | 4 | 188707345 | 1/1 | 9 |
| RS10485090 | 673 | | | 6 | 82882374 | 1/1 | 3 |
| RS7181421 | 1291 | | | 15 | 77626966 | 2/2 | 97 |
| RS3964705 | 1267 | LOC440261 | 440261 | 15 | 28822861 | 1/1 | 158 |
| RS1935720 | 68 | | | 1 | 99638912 | 3/3 | 191 |
| RS1433450 | 1293 | | | 15 | 85342066 | 1/1 | 2 |
| RS1452528 | 670 | | | 6 | 79155079 | 1/1 | 63 |
| RS10486694 | 724 | | | 7 | 40687431 | 1/1 | 1 |
| RS2089907 | 122 | | | 2 | 2454467 | 1/1 | 133 |
| RS10484693 | 603 | GMDS | 2762 | 6 | 1855107 | 1/3 | 12 |
| RS1922036 | 207 | | | 2 | 146473771 | 1/1 | 130 |
| RS868691 | 971 | | | 10 | 25945882 | 2/2 | 211 |
| RS745708 | 976 | FRMPD2 | 143162 | 10 | 49115681 | 1/1 | 150 |
| RS10502055 | 1104 | | | 11 | 104747888 | 2/2 | 72 |
| RS1369763 | 1397 | | | 18 | 71200032 | 2/2 | 210 |
| RS2825652 | 1441 | | | 21 | 19865219 | 2/2 | 239 |
| RS10521241 | 1303 | | | 16 | 49914787 | 1/1 | 4 |
| RS10486012 | 742 | | | 7 | 105824729 | 2/4 | 9 |
| RS1852561 | 731 | | | 7 | 69770184 | 2/4 | 15 |
| RS296032 | 200 | | | 2 | 123318299 | 2/2 | 8 |
| RS10495667 | 141 | VSNL1 | 7447 | 2 | 17745120 | 1/3 | 5 |
| RS950796 | 198 | | | 2 | 123281107 | 1/1 | 159 |
| RS10510155 | 1037 | | | 10 | 128313990 | 2/2 | 188 |
| RS10511356 | 291 | LSAMP | 4045 | 3 | 117596428 | 2/2 | 219 |
| RS1025927 | 831 | TRPA1 | 8989 | 8 | 73125689 | 1/1 | 221 |
| RS285098 | 1222 | FARP1 | 10160 | 13 | 97625036 | 2/2 | 42 |
| RS9315749 | 1188 | | | 13 | 39530110 | 2/2 | 27 |
| RS3850079 | 1196 | | | 13 | 56263149 | 1/1 | 21 |
| RS340680 | 499 | | | 5 | 8438180 | 1/1 | 12 |
| RS10520754 | 1294 | MCTP2 | 55784 | 15 | 92760413 | 2/2 | 66 |
| RS950016 | 1244 | | | 14 | 81514393 | 2/2 | 220 |
| RS1936671 | 97 | | | 1 | 189055410 | 2/2 | 139 |
| RS1371076 | 1146 | | | 12 | 89063918 | 1/1 | 21 |
| RS719025 | 1448 | | | 21 | 28674882 | 3/3 | 9 |
| RS717694 | 442 | | | 4 | 156772800 | 2/2 | 8 |
| RS2893569 | 723 | POU6F2 | 11281 | 7 | 38839984 | 1/1 | 227 |
| RS641445 | 1398 | | | 18 | 72182254 | 3/3 | 2 |
| RS4697055 | 322 | | | 4 | 23943605 | 1/1 | 142 |
| RS9318541 | 1206 | | | 13 | 77856249 | 2/2 | 24 |
| RS720613 | 749 | | | 7 | 124046621 | 2/2 | 146 |
| RS1465135 | 697 | | | 6 | 164166038 | 1/1 | 123 |
| RS295577 | 524 | mimitin | 91942 | 5 | 60457592 | 2/2 | 2 |
| RS7574093 | 176 | | | 2 | 56818904 | 1/3 | 10 |
| RS10517442 | 351 | | | 4 | 59273158 | 2/2 | 5 |
| RS7768538 | 630 | HLA-DQB2 | 3120 | 6 | 32837799 | 1/1 | 85 |
| RS1566728 | 1075 | PTPRJ | 5795 | 11 | 48121423 | 1/1 | 139 |
| RS3805134 | 295 | SLC15A2 | 6565 | 3 | 123100746 | 2/2 | 43 |
| RS7075669 | 1018 | | | 10 | 107583390 | 1/1 | 59 |
| RS10502056 | 1103 | | | 11 | 104677259 | 2/2 | 55 |
| RS1385080 | 1271 | | | 15 | 44513999 | 3/3 | 225 |
| RS10507553 | 1190 | | | 13 | 46687101 | 2/4 | 5 |
| RS1411315 | 1207 | | | 13 | 78638797 | 1/1 | 21 |
| RS7139422 | 1152 | FLJ25323 | 374470 | 12 | 102339523 | 1/1 | 1 |
| RS1235012 | 760 | CSMD1 | 64478 | 8 | 4294524 | 2/2 | 210 |
| RS7174236 | 1284 | RORA | 6095 | 15 | 58970994 | 2/2 | 8 |
| RS1993745 | 1055 | TMEM16C | 63982 | 11 | 26376767 | 2/2 | 37 |
| RS1341002 | 1264 | | | 14 | 94432505 | 2/2 | 102 |
| RS10498032 | 239 | ABCA12 | 26154 | 2 | 215779991 | 1/1 | 31 |
| RS989177 | 748 | | | 7 | 124006837 | 2/2 | 15 |
| RS1217654 | 761 | CSMD1 | 64478 | 8 | 4294769 | 2/2 | 203 |
| RS7453920 | 631 | HLA-DQB2 | 3120 | 6 | 32837990 | 1/1 | 32 |
| RS1604613 | 1197 | | | 13 | 69021604 | 2/2 | 47 |
| RS548533 | 1462 | LOC139060 | 139060 | X | 45600270 | 2/2 | 187 |
| RS479554 | 1463 | | | X | 45608877 | 1/1 | 59 |
| RS4686384 | 255 | | | 3 | 1036761 | 1/1 | 104 |
| RS10506626 | 1128 | TSPAN8 | 7103 | 12 | 69815758 | 1/1 | 18 |
| RS198278 | 711 | | | 7 | 24021433 | 1/1 | 55 |
| RS295525 | 525 | | | 5 | 60508623 | 2/2 | 2 |
| RS1886452 | 1200 | | | 13 | 72884855 | 1/1 | 158 |
| RS2009373 | 1415 | CARD8 | 22900 | 19 | 53411226 | 2/2 | 44 |
| RS6086149 | 1420 | | | 20 | 7586703 | 1/1 | 142 |
| RS10500986 | 1053 | LUZP2 | 338645 | 11 | 24592114 | 2/2 | 145 |
| RS10497776 | 228 | | | 2 | 196795652 | 1/1 | 244 |
| RS2832726 | 1451 | | | 21 | 30552005 | 1/1 | 78 |
| RS10495519 | 123 | | | 2 | 5524537 | 1/1 | 6 |
| RS10492135 | 1114 | GRIN2B | 2904 | 12 | 13777535 | 2/2 | 13 |
| RS10508840 | 973 | | | 10 | 36638433 | 1/1 | 6 |
| RS167164 | 199 | | | 2 | 123281157 | 2/2 | 157 |
| RS967220 | 264 | | | 3 | 29275054 | 3/3 | 5 |
| RS10493306 | 6 | NFIA | 4774 | 1 | 61389723 | 2/2 | 5 |
| RS2111826 | 309 | CLDN11 | 5010 | 3 | 171623548 | 1/3 | 39 |
| RS722508 | 1084 | | | 11 | 62792962 | 1/1 | 46 |
| RS7220359 | 1354 | RGS9 | 8787 | 17 | 60614155 | 1/3 | 14 |
| RS10490838 | 263 | | | 3 | 24574382 | 1/1 | 234 |
| RS2069837 | 710 | IL6 | 3569 | 7 | 22541267 | 1/1 | 217 |
| RS1485871 | 454 | LOC442117 | 442117 | 4 | 173125753 | 1/1 | 14 |
| RS2113487 | 153 | GALNT14 | 79623 | 2 | 31164203 | 1/1 | 87 |
| RS10519370 | 425 | | | 4 | 137332061 | 2/2 | 78 |
| RS1905155 | 556 | | | 5 | 113301097 | 3/3 | 116 |
| RS3827702 | 1423 | TASP1 | 55617 | 20 | 13446812 | 2/2 | 126 |
| RS10500783 | 1049 | | | 11 | 13530190 | 2/2 | 199 |
| RS724334 | 273 | CAST1 | 26059 | 3 | 55933122 | 2/2 | 174 |
| RS6852538 | 427 | | | 4 | 137338578 | 1/1 | 79 |
| RS6954168 | 755 | LOC653748 | 653748 | 7 | 153533800 | 2/2 | 241 |
| RS10512680 | 509 | FLJ39155 | 133584 | 5 | 38307189 | 1/1 | 62 |
| RS10518649 | 424 | | | 4 | 135764876 | 2/2 | 182 |
| RS2244327 | 899 | | | 9 | 18249760 | 2/2 | 89 |
| RS1153350 | 1437 | | | 21 | 15008235 | 1/1 | 3 |
| RS4510935 | 945 | | | 9 | 117364905 | 2/2 | 6 |
| RS1942578 | 1402 | | | 18 | 73322001 | 2/2 | 51 |
| RS953177 | 823 | DNAJC5B | 85479 | 8 | 67096174 | 2/2 | 222 |
| RS7701903 | 549 | | | 5 | 97968838 | 2/2 | 3 |
| RS309274 | 137 | | | 2 | 7151446 | 1/1 | 27 |
| RS1556082 | 1215 | GPC6 | 10082 | 13 | 93502465 | 1/1 | 7 |
| RS2616170 | 809 | | | 8 | 20610425 | 1/1 | 32 |
| RS10503626 | 808 | PSD3 | 23362 | 8 | 18591364 | 1/1 | 2 |
| RS2831853 | 1449 | | | 21 | 28781867 | 2/2 | 236 |
| RS2969004 | 422 | | | 4 | 131139275 | 3/3 | 39 |
| RS10501160 | 1070 | LOC119710 | 119710 | 11 | 36611046 | 1/1 | 1 |
| RS752355 | 213 | | | 2 | 176545532 | 1/1 | 15 |
| RS1372338 | 936 | ASTN2 | 23245 | 9 | 116620415 | 2/2 | 65 |
| RS1931610 | 1019 | LOC645254 | 645254 | 10 | 109813852 | 1/1 | 1 |
| RS1641354 | 1311 | | | 16 | 50778711 | 1/1 | 36 |
| RS6919514 | 688 | UST | 10090 | 6 | 149151922 | 3/4 | 43 |
| RS10498836 | 654 | | | 6 | 66585591 | 2/2 | 186 |
| RS1381181 | 1054 | TMEM16C | 63982 | 11 | 26340397 | 1/1 | 37 |
| RS1881014 | 732 | | | 7 | 69770606 | 2/2 | 212 |
| RS10501161 | 1072 | LOC119710 | 119710 | 11 | 36628245 | 2/2 | 215 |
| RS1351650 | 1040 | | | 11 | 7703386 | 2/2 | 63 |
| RS10489249 | 88 | | | 1 | 168446178 | 2/2 | 182 |
| RS10518089 | 351 | SLC4A4 | 8671 | 4 | 72794260 | 2/2 | 136 |
| RS4816018 | 1421 | | | 20 | 7604614 | 1/1 | 147 |
| RS950085 | 1006 | | | 10 | 95592637 | 1/1 | 24 |
| RS1823913 | 226 | MYO1B | 4430 | 2 | 191943553 | 2/2 | 147 |
| RS2383024 | 898 | C9orf39 | 54875 | 9 | 17477945 | 1/1 | 105 |
| RS9306295 | 1458 | | | 22 | 33775788 | 1/1 | 206 |
| RS10508842 | 974 | | | 10 | 36646002 | 2/2 | 7 |
| RS725500 | 364 | | | 4 | 80236951 | 2/2 | 10 |
| RS9326506 | 975 | | | 10 | 43388564 | 3/3 | 90 |
| RS9312592 | 462 | SPATA4 | 132851 | 4 | 177493018 | 2/2 | 7 |
| RS10512935 | 304 | EPHB1 | 2047 | 3 | 136107953 | 2/2 | 156 |
| RS722569 | 963 | | | 10 | 10538667 | 1/1 | 42 |
| RS1503453 | 833 | STAU2 | 27067 | 8 | 74666062 | 3/3 | 173 |
| RS719484 | 1228 | | | 14 | 26547587 | 1/1 | 172 |
| RS2477035 | 965 | | | 10 | 10571483 | 1/1 | 41 |
| RS10495033 | 112 | ESRRG | 2104 | 1 | 213264616 | 2/2 | 2 |
| RS718993 | 1336 | | | 17 | 14433113 | 1/1 | 11 |
| RS1607664 | 1410 | ZNF429 | 353088 | 19 | 21497820 | 2/2 | 9 |
| RS1073913 | 768 | | | 8 | 10649118 | 3/3 | 66 |
| RS10510104 | 1030 | ATE1 | 11101 | 10 | 123521812 | 2/2 | 5 |
| RS1927404 | 1205 | | | 13 | 76845208 | 1/1 | 95 |
| RS196584 | 715 | KIAA1706 | 80820 | 7 | 36090936 | 2/2 | 208 |
| RS9298895 | 902 | LRRN6C | 158038 | 9 | 28417657 | 1/3 | 34 |
| RS2991463 | 1209 | | | 13 | 78682643 | 2/2 | 18 |
| RS10501159 | 1069 | LOC119710 | 119710 | 11 | 36583337 | 1/1 | 1 |
| RS1541503 | 703 | LOC285929 | 285929 | 7 | 7173834 | 2/2 | 201 |
| RS4757441 | 1051 | PLEKHA7 | 144100 | 11 | 16859250 | 2/2 | 193 |
| RS9302933 | 1357 | | | 17 | 66750402 | 2/2 | 177 |
| RS309275 | 136 | | | 2 | 7150593 | 3/3 | 32 |
| RS10491279 | 578 | GDF9 | 2661 | 5 | 132225999 | 1/1 | 3 |
| RS10509153 | 989 | | | 10 | 63041318 | 2/2 | 2 |
| RS10485864 | 702 | SDK1 | 221935 | 7 | 3696897 | 2/2 | 187 |
| RS10510156 | 1036 | | | 10 | 128294406 | 1/1 | 5 |
| RS10520762 | 1295 | | | 15 | 93063543 | 2/2 | 169 |
| RS7530592 | 82 | VAV3 | 10451 | 1 | 107947761 | 3/3 | 96 |
| RS1867584 | 985 | | | 10 | 49321355 | 2/2 | 75 |
| RS10509772 | 1017 | C10orf80 | 159686 | 10 | 106149295 | 2/2 | 58 |
| RS6911443 | 675 | | | 6 | 98829624 | 1/1 | 98 |
| RS9297984 | 821 | | | 8 | 59098733 | 3/3 | 5 |
| RS10493822 | 52 | GBP1 | 2633 | 1 | 89241701 | 2/2 | 5 |
| RS165044 | 1272 | | | 15 | 44523246 | 1/1 | 101 |
| RS1928274 | 632 | GPR116 | 221395 | 6 | 46945349 | 1/1 | 11 |
| RS10508554 | 967 | SLC39A12 | 221074 | 10 | 18282641 | 2/2 | 27 |
| RS958938 | 8 | | | 1 | 66985931 | 1/1 | 2 |
| RS2964299 | 588 | | | 5 | 165876275 | 2/2 | 229 |
| RS1861373 | 1150 | | | 12 | 96275336 | 1/1 | 46 |
| RS1395817 | 431 | | | 4 | 148476328 | 1/3 | 27 |
| RS497197 | 772 | | | 8 | 12981181 | 2/2 | 2 |
| RS10498212 | 249 | IRS1 | 3667 | 2 | 227476780 | 1/1 | 232 |
| RS823986 | 579 | FSTL4 | 23105 | 5 | 132894139 | 1/1 | 22 |
| RS1544589 | 733 | PTPN12 | 5782 | 7 | 76874004 | 1/1 | 55 |
| RS7004663 | 834 | STAU2 | 27067 | 8 | 74692946 | 1/1 | 166 |
| RS4774367 | 1283 | RORA | 6095 | 15 | 58619313 | 2/2 | 131 |
| RS6863889 | 528 | | | 5 | 73560159 | 1/1 | 225 |
| RS868271 | 214 | ZNF533 | 151126 | 2 | 180255606 | 2/2 | 43 |
| RS1525489 | 745 | | | 7 | 122227424 | 2/2 | 1 |
| RS548987 | 629 | SLC17A3 | 10786 | 6 | 25977350 | 2/2 | 212 |
| RS10501933 | 1100 | CNTN5 | 53942 | 11 | 99284564 | 2/2 | 9 |
| RS1477523 | 750 | | | 7 | 136262393 | 2/2 | 222 |
| RS2163120 | 792 | | | 8 | 16165538 | 2/4 | 12 |
| RS10506524 | 1124 | MSRB3 | 253827 | 12 | 64070379 | 1/3 | 18 |
| RS4131874 | 819 | | | 8 | 42051123 | 2/2 | 136 |
| RS2981069 | 826 | | | 8 | 70100501 | 2/2 | 184 |
| RS1460597 | 1383 | DSG4 | 147409 | 18 | 27220516 | 2/2 | 14 |
| RS10511729 | 901 | | | 9 | 23547227 | 1/1 | 90 |
| RS1983726 | 86 | LOC441900 | 441900 | 1 | 119800976 | 2/2 | 12 |
| RS10511482 | 888 | | | 9 | 7512604 | 2/2 | 1 |
| RS2711452 | 185 | | | 2 | 82108603 | 1/1 | 120 |
| RS10497723 | 227 | TMEFF2 | 23671 | 2 | 192817829 | 1/1 | 216 |
| RS10500130 | 752 | | | 7 | 138273168 | 3/3 | 189 |
| RS1841914 | 261 | ZNF659 | 79750 | 3 | 21598635 | 1/1 | 47 |
| RS1938105 | 652 | | | 6 | 66567647 | 1/1 | 6 |
| RS1341001 | 1263 | | | 14 | 94432449 | 1/1 | 18 |
| RS10488204 | 706 | | | 7 | 11930380 | 2/2 | 230 |
| RS7670292 | 433 | DCAMKL2 | 166614 | 4 | 151461475 | 2/2 | 159 |
| RS7844425 | 818 | | | 8 | 32495159 | 1/1 | 101 |
| RS10510344 | 259 | GRM7 | 2917 | 3 | 7064629 | 1/3 | 34 |
| RS10516032 | 590 | LOC134541 | 134541 | 5 | 166726668 | 2/2 | 3 |
| RS6852312 | 389 | | | 4 | 105871774 | 3/3 | 225 |
| RS9317744 | 1176 | | | 13 | 22963766 | 2/4 | 11 |
| RS4368350 | 211 | | | 2 | 167367090 | 2/2 | 4 |
| RS7577293 | 186 | | | 2 | 85846940 | 1/1 | 13 |
| RS10514263 | 545 | EDIL3 | 10085 | 5 | 83426017 | 1/1 | 299 |
| RS10514632 | 212 | RAPGEF4 | 11069 | 2 | 173530419 | 1/1 | 6 |
| RS1376499 | 674 | | | 6 | 98759316 | 3/3 | 70 |
| RS7148756 | 1240 | | | 14 | 58616282 | 1/1 | 4 |
| RS2165347 | 1317 | | | 16 | 58809040 | 2/2 | 24 |
| RS1199292 | 741 | ACN9 | 57001 | 7 | 96432248 | 2/2 | 33 |
| RS1441541 | 490 | | | 5 | 3303352 | 1/1 | 5 |
| RS171785 | 596 | | | 5 | 170994432 | 1/1 | 30 |
| RS10484331 | 608 | | | 6 | 8940232 | 2/2 | 87 |
| RS2572276 | 1389 | | | 18 | 39324404 | 1/1 | 23 |
| RS10483323 | 1227 | | | 14 | 26354562 | 1/1 | 11 |
| RS3859362 | 1382 | DSG4 | 147409 | 18 | 27218666 | 2/2 | 14 |
| RS10513765 | 316 | PEX5L | 51555 | 3 | 181027572 | 2/2 | 32 |
| RS964059 | 879 | | | 8 | 124904538 | 3/3 | 159 |
| RS2825583 | 1440 | | | 21 | 19734374 | 2/2 | 85 |
| RS8137239 | 1456 | LOC644802 | 644802 | 22 | 15504963 | 1/1 | 1 |
| RS6699989 | 44 | | | 1 | 87784403 | 1/1 | 9 |
| RS2396821 | 635 | | | 6 | 47183758 | 1/1 | 166 |
| RS10507930 | 1212 | | | 13 | 82396265 | 1/3 | 6 |
| RS7324065 | 1220 | ABCC4 | 10257 | 13 | 94503308 | 1/3 | 13 |
| RS1329983 | 29 | | | 1 | 73801814 | 1/1 | 3 |
| RS7874576 | 896 | | | 9 | 12600410 | 1/3 | 5 |
| RS10513275 | 308 | | | 3 | 147165932 | 2/2 | 192 |
| RS1324088 | 628 | | | 6 | 25949101 | 2/2 | 212 |
| RS10495466 | 118 | FMN2 | 56776 | 1 | 236834608 | 2/2 | 227 |
| RS718911 | 1286 | RORA | 6095 | 15 | 59169716 | 1/1 | 194 |
| RS4952676 | 168 | PLEKHH2 | 130271 | 2 | 43841634 | 1/1 | 100 |
| RS10518774 | 1282 | UNC13C | 440279 | 15 | 52700466 | 1/1 | 61 |
| RS488673 | 694 | SYNE1 | 23345 | 6 | 152811716 | 2/2 | 88 |
| RS3815035 | 1355 | MAP2K6 | 5608 | 17 | 65043983 | 2/2 | 5 |
| RS3890717 | 114 | | | 1 | 217860308 | 3/3 | 45 |
| RS188014 | 1193 | LOC647154 | 647154 | 13 | 49867924 | 1/3 | 15 |
| RS10508318 | 957 | | | 10 | 7090365 | 1/1 | 8 |
| RS472154 | 43 | COL24A1 | 255631 | 1 | 86167436 | 2/2 | 19 |
| RS9300024 | 1073 | | | 11 | 37240693 | 1/1 | 65 |
| RS10512405 | 927 | SVEP1 | 79987 | 9 | 110316352 | 2/2 | 19 |
| RS7009058 | 820 | SNTG1 | 54212 | 8 | 51656260 | 3/3 | 181 |
| RS341148 | 696 | TULP4 | 56995 | 6 | 158810407 | 2/2 | 101 |
| RS9302288 | 1290 | | | 15 | 77462356 | 1/1 | 155 |
| Rs10498604 | 1249 | | | 14 | 86238836 | 2/2 | 17 |
| RS6812018 | 355 | | | 4 | 66863258 | 3/3 | 197 |
| RS10514569 | 1325 | CDH13 | 1012 | 16 | 82033605 | 3/4 | 13 |
| RS3751462 | 1239 | LOC283553 | 283553 | 14 | 50897971 | 1/1 | 150 |
| RS987479 | 714 | | | 7 | 34729664 | 1/1 | 149 |
| RS1233853 | 1334 | FLJ34690 | 284034 | 17 | 12474944 | 1/1 | 2 |
| RS979323 | 1248 | | | 14 | 84118710 | 1/1 | 40 |
| RS962592 | 476 | | | 4 | 181367262 | 2/2 | 243 |
| RS5962018 | 1459 | | | X | 6207596 | 2/2 | 210 |
| RS362988 | 1422 | SNAP25 | 6616 | 20 | 10229370 | 1/1 | 77 |
| RS945849 | 933 | C9orf84 | 158401 | 9 | 111585474 | 1/1 | 166 |
| RS7078806 | 1026 | | | 10 | 11845599 | 1/1 | 224 |
| RS8089476 | 1392 | | | 18 | 46107418 | 2/2 | 35 |
| RS9293488 | 546 | | | 5 | 87103437 | 2/2 | 218 |
| RS1340169 | 1198 | | | 13 | 71876062 | 3/4 | 9 |
| RS6109935 | 1424 | TASP1 | 55617 | 20 | 13467837 | 2/2 | 19 |
| RS10502776 | 1385 | PIK3C3 | 5289 | 18 | 37832275 | 1/1 | 237 |
| RS1403635 | 257 | CNTN4 | 152330 | 3 | 2264798 | 2/2 | 8 |
| RS3800274 | 629 | C6orf96 | 55005 | 6 | 151851306 | 3/3 | 13 |
| RS1459914 | 280 | | | 3 | 67849940 | 3/3 | 203 |
| RS1233775 | 1425 | C20orf133 | 140733 | 20 | 15451543 | 2/3 | 137 |
| RS9294240 | 672 | | | 6 | 82703881 | 1/1 | 19 |
| RS1407390 | 931 | C9orf84 | 158401 | 9 | 111544042 | 2/2 | 170 |
| RS10495804 | 159 | | | 2 | 34169804 | 2/2 | 26 |
| RS6477845 | 930 | C9orf84 | 158401 | 9 | 111541877 | 1/1 | 3 |
| RS10501158 | 1068 | LOC119710 | 119710 | 11 | 36582180 | 1/1 | 217 |
| RS1945654 | 1086 | LOC646169 | 646169 | 11 | 80901934 | 2/2 | 186 |
| RS3814860 | 1235 | FBXO33 | 254170 | 14 | 38938397 | 3/3 | 160 |
| RS2881836 | 234 | AOX2 | 344454 | 2 | 201469088 | 3/3 | 110 |
| RS1805781 | 1111 | PHC1 | 1911 | 12 | 8957155 | 1/3 | 8 |
| RS294665 | 197 | | | 2 | 123276926 | 2/2 | 159 |
| RS3897748 | 113 | | | 1 | 214677604 | 2/2 | 170 |
| RS10517222 | 332 | | | 4 | 30831187 | 1/1 | 151 |
| RS10507083 | 1149 | | | 12 | 96255384 | 1/1 | 16 |
| RS796892 | 296 | | | 3 | 123868092 | 2/2 | 19 |
| RS7002137 | 769 | | | 8 | 10653610 | 2/2 | 180 |
| RS7719212 | 501 | | | 5 | 23658681 | 2/2 | 231 |
| RS713265 | 70 | | | 1 | 99649058 | 2/2 | 1 |
| RS6848015 | 448 | PALLD | 23022 | 4 | 169822829 | 2/2 | 176 |
| RS10495202 | 115 | LOC644053 | 644053 | 1 | 219385670 | 1/1 | 146 |
| RS4129693 | 142 | | | 2 | 18864906 | 2/2 | 148 |
| RS4073474 | 294 | IQCB1 | 9657 | 3 | 122990105 | 1/1 | 103 |
| RS150344 | 1302 | | | 16 | 22728560 | 3/3 | 176 |
| RS1915552 | 844 | | | 8 | 80237554 | 1/1 | 34 |
| RS1440063 | 248 | | | 2 | 223677858 | 1/1 | 85 |
| RS494739 | 685 | | | 6 | 137969137 | 2/2 | 209 |
| RS2391476 | 421 | | | 4 | 130916643 | 3/3 | 4 |
| RS2054915 | 1089 | FLJ22104 | 65084 | 11 | 86668250 | 1/1 | 66 |
| RS989766 | 1431 | PTPRT | 11122 | 20 | 40443639 | 2/2 | 129 |
| RS7675645 | 352 | | | 4 | 59309086 | 1/1 | 167 |
| RS1571502 | 65 | PAP2D | 163404 | 1 | 99137091 | 2/2 | 1 |
| RS1661405 | 699 | | | 6 | 165561151 | 1/3 | 10 |
| RS2675200 | 258 | | | 3 | 4118873 | 2/4 | 32 |
| RS3905336 | 906 | | | 9 | 72699914 | 2/4 | 7 |
| RS652238 | 1395 | | | 18 | 64109605 | 2/2 | 181 |
| RS3852745 | 1301 | GRIN2A | 2903 | 16 | 10156361 | 1/1 | 12 |
| RS10491948 | 895 | | | 9 | 11522517 | 2/2 | 228 |
| RS10490414 | 177 | | | 2 | 56927557 | 2/4 | 8 |
| RS3751337 | 1180 | KIAA0774 | 23281 | 13 | 28796573 | 1/1 | 21 |
| RS1041802 | 1446 | | | 21 | 27965603 | 3/3 | 124 |
| RS10505725 | 1110 | DCP1B | 196513 | 12 | 1926624 | 2/2 | 131 |
| RS1207613 | 1460 | | | X | 24327376 | 2/2 | 194 |
| RS4981115 | 1230 | NUBPL | 80224 | 14 | 31240826 | 1/1 | 4 |
| RS1150030 | 959 | | | 10 | 9405319 | 1/1 | 1 |
| RS2217610 | 700 | SDK1 | 221935 | 7 | 3503877 | 1/1 | 142 |
| RS596255 | 837 | | | 8 | 80164544 | 2/2 | 22 |
| RS7906587 | 1025 | PNLIPRP3 | 119548 | 10 | 118221656 | 2/2 | 227 |
| RS10489251 | 89 | | | 1 | 168449191 | 3/3 | 5 |
| RS10509766 | 1016 | NT5C2 | 22978 | 10 | 104916324 | 2/2 | 29 |
| RS4890429 | 1387 | RIT2 | 6014 | 18 | 38951479 | 1/1 | 129 |
| RS7694034 | 377 | MAPK10 | 5602 | 4 | 87647635 | 1/1 | 8 |
| RS7963889 | 1134 | | | 12 | 73136950 | 1/1 | 31 |
| RS286300 | 1404 | LOC401898 | 401898 | 19 | 11658308 | 2/2 | 218 |
| RS10493985 | 78 | COL11A1 | 1301 | 1 | 103282453 | 1/3 | 7 |
| RS6823379 | 335 | | | 4 | 41552790 | 1/1 | 237 |
| RS499891 | 1076 | GLYAT | 10249 | 11 | 58246797 | 1/1 | 241 |
| RS539085 | 1077 | GLYAT | 10249 | 11 | 58255401 | 2/2 | 241 |
| RS2156348 | 1078 | GLYATL2 | 219970 | 11 | 58360325 | 2/2 | 241 |
| RS477892 | 1079 | | | 11 | 58375953 | 1/1 | 241 |
| RS480413 | 1080 | | | 11 | 58376174 | 1/3 | 9 |
| RS2856259 | 1081 | | | 11 | 58376529 | 1/3 | 9 |
| RS4939237 | 1082 | | | 11 | 58419301 | 1/3 | 9 |
| RS10502807 | 1386 | RIT2 | 6014 | 18 | 38802002 | 2/2 | 185 |
| RS10512282 | 923 | GRIN3A | 116443 | 9 | 101413888 | 1/1 | 205 |
| RS10500585 | 1319 | | | 16 | 72882363 | 2/2 | 118 |
| RS823638 | 934 | C9orf84 | 158401 | 9 | 111622316 | 1/1 | 3 |
| RS697902 | 318 | | | 3 | 192932251 | 2/2 | 91 |
| RS10493987 | 77 | COL11A1 | 1301 | 1 | 103278613 | 1/3 | 5 |
| RS4733224 | 817 | WRN | 7486 | 8 | 31086911 | 1/1 | 90 |
| RS2731239 | 1145 | | | 12 | 89061969 | 2/2 | 22 |
| RS7459039 | 705 | | | 7 | 9668794 | 1/1 | 13 |
| RS1156968 | 1233 | | | 14 | 38232528 | 2/2 | 194 |
| RS7470491 | 932 | C9orf84 | 158401 | 9 | 111569863 | 2/2 | 166 |
| RS10485148 | 619 | | | 6 | 23080312 | 2/2 | 26 |
| RS564896 | 143 | FLJ21820 | 60526 | 2 | 20899161 | 2/2 | 23 |
| RS666941 | 240 | | | 2 | 221567963 | 1/1 | 47 |
| RS10506603 | 1126 | PTPRR | 5801 | 12 | 69367960 | 2/3 | 7 |
| RS2669892 | 290 | ZBTB20 | 26137 | 3 | 115817713 | 1/1 | 165 |
| RS6477360 | 891 | PTPRD | 5789 | 9 | 8887230 | 1/1 | 69 |
| RS10506602 | 1125 | PTPRR | 5801 | 12 | 69348510 | 2/2 | 227 |
| RS10518821 | 1289 | | | 15 | 67669717 | 1/1 | 161 |
| RS10508269 | 956 | | | 10 | 3903483 | 1/1 | 4 |
| RS10512501 | 1353 | TEX2 | 55852 | 17 | 59677087 | 1/1 | 1 |
| RS757668 | 744 | | | 7 | 122175535 | 1/1 | 35 |
| RS10518404 | 412 | | | 4 | 123936746 | 2/2 | 216 |
| RS1813404 | 1246 | | | 14 | 84116590 | 2/2 | 114 |
| RS10510020 | 1024 | PNLIPRP3 | 119548 | 10 | 118221295 | 1/1 | 227 |
| RS10510022 | 1027 | | | 10 | 118275623 | 1/1 | 227 |
| RS10510023 | 1028 | | | 10 | 118275843 | 1/1 | 1 |
| RS723855 | 1436 | | | 21 | 14771745 | 1/1 | 12 |
| RS10491340 | 581 | | | 5 | 147370294 | 2/2 | 7 |
| RS713266 | 69 | | | 1 | 99648777 | 2/2 | 217 |
| RS2011688 | 83 | SLC6A17 | 388662 | 1 | 110441446 | 2/2 | 211 |
| RS2826847 | 1443 | NCAM2 | 4685 | 21 | 21749297 | 2/2 | 195 |
| RS869206 | 1071 | LOC119710 | 119710 | 11 | 36615190 | 2/2 | 218 |
| RS1355296 | 1268 | | | 15 | 34027338 | 1/1 | 3 |
| RS9298249 | 835 | | | 8 | 7620083 | 1/1 | 1 |
| RS580758 | 390 | | | 4 | 105928555 | 1/1 | 4 |
| RS10517618 | 439 | | | 4 | 156628360 | 3/3 | 122 |
| RS979322 | 1247 | | | 14 | 84118568 | 2/2 | 82 |
| RS9298675 | 886 | | | 9 | 1242572 | 2/2 | 1 |
| RS2863171 | 1074 | | | 11 | 45207308 | 3/3 | 5 |
| RS1459506 | 446 | | | 4 | 166905208 | 1/1 | 29 |
| RS1822539 | 924 | | | 9 | 103821410 | 2/2 | 177 |
| RS10488521 | 740 | CDK6 | 1021 | 7 | 91987519 | 2/2 | 7 |
| RS10504894 | 864 | | | 8 | 91585612 | 1/1 | 24 |
| RS2255751 | 964 | | | 10 | 10568976 | 2/2 | 45 |
| RS7827548 | 765 | CSMD1 | 64478 | 8 | 4593724 | 2/2 | 111 |
| RS1451336 | 677 | | | 6 | 98849320 | 1/1 | 74 |
| RS10493355 | 7 | ROR1 | 4919 | 1 | 64255969 | 1/1 | 1 |
| RS1926029 | 1014 | NT5C2 | 22978 | 10 | 104845660 | 2/2 | 129 |
| RS2572269 | 1388 | | | 18 | 39310973 | 1/1 | 22 |
| RS10507118 | 1151 | TMEM16D | 121601 | 12 | 99722902 | 2/2 | 4 |

| RS_id | avg1 | g2 | n2 | avg2 | g3 | n3 | avg3 | F | dft | dfe | P-value |
|---|---|---|---|---|---|---|---|---|---|---|---|
| RS1410126 | 1.97 | 1/2 | 60 | 1.23 | 2/2 | 181 | 1.3 | 15.35 | 2 | 243 | 5.28E−07 |
| RS10498321 | 1.27 | 1/2 | 59 | 1.36 | 2/2 | 1 | 2.77 | 15.31 | 2 | 244 | 5.45E−07 |
| RS744832 | 2.77 | 1/3 | 53 | 1.36 | 3/3 | 192 | 1.27 | 14.8 | 2 | 243 | 8.61E−07 |
| RS10485909 | 1.3 | 2/4 | 20 | 1.21 | 4/4 | 1 | 2.77 | 13.9 | 2 | 245 | 1.91E−06 |
| RS2195989 | 1.76 | 2/4 | 53 | 1.35 | 4/4 | 178 | 1.26 | 13.72 | 2 | 237 | 2.30E−06 |
| RS1399503 | 1.29 | 3/4 | 41 | 1.24 | 4/4 | 2 | 2.33 | 13.64 | 2 | 244 | 2.42E−06 |
| RS4102401 | 2.77 | 2/4 | 19 | 1.36 | 4/4 | 229 | 1.29 | 13.6 | 2 | 246 | 2.50E−06 |
| RS10518533 | 1.96 | 1/2 | 104 | 1.3 | 2/2 | 126 | 1.26 | 13.6 | 2 | 232 | 2.60E−06 |
| RS10504433 | 1.28 | 2/4 | 53 | 1.33 | 4/4 | 1 | 2.77 | 13.51 | 2 | 247 | 2.70E−06 |
| RS10516418 | 1.29 | 1/3 | 27 | 1.36 | 3/3 | 1 | 2.77 | 13.43 | 2 | 238 | 2.98E−06 |
| RS2230133 | 1.3 | 2/3 | 43 | 1.25 | 3/3 | 1 | 2.77 | 13.35 | 2 | 246 | 3.13E−06 |
| RS10498260 | 2.77 | 1/3 | 38 | 1.3 | 3/3 | 192 | 1.28 | 13.31 | 2 | 228 | 3.41E−06 |
| RS10486467 | 2.77 | 1/3 | 9 | 1.21 | 3/3 | 237 | 1.29 | 13.22 | 2 | 244 | 3.54E−06 |
| RS2120650 | 1.29 | 1/3 | 26 | 1.32 | 3/3 | 1 | 2.77 | 13.07 | 2 | 247 | 4.02E−06 |
| RS1467596 | 2.77 | 1/3 | 12 | 1.26 | 3/3 | 235 | 1.29 | 13.06 | 2 | 245 | 4.08E−06 |
| RS2170398 | 2.77 | 2/4 | 41 | 1.31 | 4/4 | 206 | 1.29 | 13.02 | 2 | 245 | 4.23E−06 |
| RS352766 | 2.77 | 2/4 | 30 | 1.27 | 4/4 | 218 | 1.29 | 12.97 | 2 | 246 | 4.41E−06 |
| RS10488888 | 2.77 | 2/4 | 6 | 1.33 | 4/4 | 242 | 1.29 | 12.95 | 2 | 246 | 4.49E−06 |
| RS4960221 | 1.29 | 2/4 | 61 | 1.31 | 4/4 | 1 | 2.77 | 12.94 | 2 | 245 | 4.55E−06 |
| RS10494066 | 1.89 | 2/4 | 86 | 1.29 | 4/4 | 155 | 1.28 | 12.94 | 2 | 244 | 4.56E−06 |
| RS10517155 | 2.77 | 2/4 | 51 | 1.29 | 4/4 | 198 | 1.29 | 12.92 | 2 | 247 | 4.61E−06 |
| RS9303878 | 1.3 | 1/4 | 34 | 1.24 | 4/4 | 2 | 2.32 | 12.82 | 2 | 235 | 5.20E−06 |
| RS10510995 | 2.77 | 1/3 | 12 | 1.27 | 3/3 | 232 | 1.3 | 12.77 | 2 | 242 | 5.34E−06 |
| RS718759 | 2.77 | 2/3 | 26 | 1.27 | 3/3 | 205 | 1.3 | 12.54 | 2 | 229 | 6.79E−06 |
| RS1480145 | 1.28 | 2/3 | 12 | 1.67 | 0/0 | 0 | 0 | 20.78 | 1 | 248 | 8.10E−06 |
| RS10485110 | 1.87 | 3/4 | 70 | 1.29 | 4/4 | 171 | 1.27 | 12.1 | 2 | 244 | 9.76E−06 |
| RS1902049 | 1.27 | 3/4 | 92 | 1.25 | 4/4 | 18 | 1.61 | 12.06 | 2 | 243 | 1.01E−05 |
| RS2235216 | 1.87 | 1/3 | 72 | 1.3 | 3/3 | 150 | 1.28 | 11.62 | 2 | 225 | 1.58E−05 |
| RS470559 | 1.94 | 2/3 | 53 | 1.19 | 3/3 | 194 | 1.32 | 11.55 | 2 | 247 | 1.60E−05 |
| RS10503573 | 1.28 | 1/2 | 14 | 1.63 | 0/0 | 0 | 0 | 19.29 | 1 | 248 | 1.66E−05 |
| RS2854946 | 1.66 | 2/3 | 66 | 1.3 | 3/3 | 134 | 1.25 | 11.44 | 2 | 210 | 1.92E−05 |
| RS4631686 | 1.74 | 3/3 | 237 | 1.29 | 0/0 | 0 | 0 | 18.76 | 1 | 243 | 2.17E−05 |
| RS6954679 | 1.27 | 1/3 | 38 | 1.35 | 3/3 | 3 | 2.05 | 11.12 | 2 | 245 | 2.38E−05 |
| RS866651 | 1.29 | 2/3 | 72 | 1.25 | 3/3 | 10 | 1.71 | 11.01 | 2 | 246 | 2.63E−05 |
| RS2255565 | 1.29 | 1/2 | 55 | 1.25 | 2/2 | 4 | 1.96 | 10.93 | 2 | 247 | 2.83E−05 |
| RS10483988 | 1.29 | 2/4 | 66 | 1.26 | 4/4 | 4 | 1.96 | 10.81 | 2 | 245 | 3.17E−05 |
| RS387661 | 2.25 | 2/4 | 39 | 1.27 | 4/4 | 208 | 1.29 | 10.66 | 2 | 246 | 3.63E−05 |
| RS2029259 | 1.26 | 1/2 | 49 | 1.41 | 2/2 | 4 | 1.77 | 10.63 | 2 | 244 | 3.75E−05 |
| RS2113515 | 1.29 | 2/4 | 57 | 1.27 | 4/4 | 4 | 1.96 | 10.6 | 2 | 245 | 3.84E−05 |
| RS10503586 | 1.28 | 1/3 | 12 | 1.65 | 0/0 | 0 | 0 | 17.39 | 1 | 242 | 4.24E−05 |
| RS285406 | 1.27 | 2/4 | 22 | 1.55 | 0/0 | 0 | 0 | 17.25 | 1 | 248 | 4.51E−05 |
| RS6811055 | 1.27 | 2/4 | 102 | 1.4 | 4/4 | 54 | 1.18 | 10.43 | 2 | 228 | 4.63E−05 |
| RS397618 | 1.28 | 2/4 | 14 | 1.61 | 0/0 | 0 | 0 | 17.06 | 1 | 248 | 4.95E−05 |
| RS896990 | 2.03 | 1/2 | 41 | 1.35 | 2/2 | 198 | 1.28 | 10.31 | 2 | 239 | 5.07E−05 |
| RS250387 | 1.24 | 1/3 | 67 | 1.43 | 3/3 | 8 | 1.4 | 10.24 | 2 | 244 | 5.37E−05 |
| RS9299445 | 1.27 | 2/4 | 34 | 1.38 | 4/4 | 3 | 1.97 | 10.01 | 2 | 240 | 6.68E−05 |
| RS10516673 | 1.28 | 1/3 | 13 | 1.62 | 0/0 | 0 | 0 | 16.13 | 1 | 248 | 7.84E−05 |
| RS10520350 | 2.38 | 2/3 | 18 | 1.45 | 3/3 | 230 | 1.28 | 9.8 | 2 | 246 | 8.03E−05 |
| RS9299446 | 1.97 | 1/2 | 37 | 1.37 | 2/2 | 210 | 1.27 | 9.7 | 2 | 247 | 8.80E−05 |
| RS2170116 | 1.27 | 2/4 | 19 | 1.56 | 0/0 | 0 | 0 | 15.88 | 1 | 248 | 8.88E−05 |
| RS4888946 | 1.27 | 1/4 | 62 | 1.32 | 4/4 | 3 | 2.01 | 9.67 | 2 | 239 | 9.15E−05 |
| RS10495783 | 1.44 | 2/4 | 130 | 1.23 | 4/4 | 67 | 1.32 | 9.65 | 2 | 244 | 9.26E−05 |
| RS10516834 | 1.95 | 1/3 | 25 | 1.18 | 3/3 | 217 | 1.3 | 9.34 | 2 | 242 | 1.24E−04 |
| RS2207139 | 1.74 | 2/4 | 76 | 1.26 | 4/4 | 164 | 1.29 | 9.33 | 2 | 245 | 1.24E−04 |
| RS8054578 | 2.01 | 1/3 | 65 | 1.32 | 3/3 | 176 | 1.27 | 9.33 | 2 | 241 | 1.25E−04 |
| RS7897958 | 1.77 | 1/4 | 63 | 1.24 | 4/4 | 179 | 1.3 | 9.31 | 2 | 245 | 1.27E−04 |
| RS1121640 | 1.28 | 2/4 | 28 | 1.36 | 4/4 | 2 | 2.15 | 9.26 | 2 | 245 | 1.33E−04 |
| RS10493425 | 1.28 | 1/2 | 13 | 1.23 | 2/2 | 2 | 2.12 | 9.28 | 2 | 228 | 1.33E−04 |
| RS965158 | 1.64 | 4/4 | 239 | 1.28 | 0/0 | 0 | 0 | 15 | 1 | 248 | 1.38E−04 |
| RS10482871 | 1.8 | 3/3 | 245 | 1.29 | 0/0 | 0 | 0 | 15 | 1 | 248 | 1.38E−04 |
| RS10503572 | 1.81 | 3/3 | 243 | 1.29 | 0/0 | 0 | 0 | 14.97 | 1 | 246 | 1.40E−04 |
| RS9316436 | 1.34 | 2/3 | 58 | 1.16 | 3/3 | 5 | 1.31 | 9.15 | 2 | 243 | 1.47E−04 |
| RS812800 | 1.71 | 1/3 | 73 | 1.28 | 3/3 | 163 | 1.28 | 9.11 | 2 | 242 | 1.53E−04 |
| RS10508377 | 1.31 | 1/3 | 29 | 1.18 | 3/3 | 1 | 2.38 | 9.05 | 2 | 245 | 1.61E−04 |
| RS10500985 | 1.73 | 1/2 | 75 | 1.31 | 2/2 | 146 | 1.26 | 8.98 | 2 | 224 | 1.77E−04 |
| RS3116231 | 2.12 | 2/3 | 49 | 1.34 | 3/3 | 196 | 1.27 | 8.95 | 2 | 244 | 1.77E−04 |
| RS1490125 | 1.34 | 3/4 | 66 | 1.18 | 0/0 | 0 | 0 | 14.45 | 1 | 245 | 1.82E−04 |
| RS8049647 | 1.26 | 1/3 | 76 | 1.34 | 3/3 | 7 | 1.71 | 8.91 | 2 | 246 | 1.84E−04 |
| RS10517562 | 1.19 | 1/3 | 116 | 1.23 | 3/3 | 106 | 1.38 | 8.83 | 2 | 243 | 1.99E−04 |
| RS2222654 | 1.19 | 1/3 | 88 | 1.37 | 3/3 | 54 | 1.34 | 8.83 | 2 | 216 | 2.06E−04 |
| RS2357344 | 1.83 | 2/4 | 26 | 1.3 | 4/4 | 189 | 1.27 | 8.8 | 2 | 217 | 2.11E−04 |
| RS4869279 | 1.31 | 2/4 | 75 | 1.23 | 4/4 | 4 | 1.83 | 8.75 | 2 | 244 | 2.14E−04 |
| RS11232919 | 2.15 | 2/4 | 64 | 1.27 | 4/4 | 183 | 1.3 | 8.74 | 2 | 246 | 2.15E−04 |
| RS9315157 | 1.38 | 1/3 | 49 | 1.45 | 3/3 | 193 | 1.25 | 8.71 | 2 | 245 | 2.22E−04 |
| RS1675904 | 1.27 | 2/4 | 30 | 1.35 | 4/4 | 1 | 2.38 | 8.69 | 2 | 232 | 2.29E−04 |
| RS1502887 | 1.27 | 2/4 | 41 | 1.46 | 0/0 | 0 | 0 | 13.98 | 1 | 246 | 2.30E−04 |
| RS1380835 | 1.31 | 3/4 | 65 | 1.22 | 4/4 | 3 | 1.88 | 8.61 | 2 | 247 | 2.43E−04 |
| RS10509764 | 1.37 | 2/4 | 96 | 1.21 | 4/4 | 27 | 1.25 | 8.59 | 2 | 246 | 2.48E−04 |
| RS10514450 | 2.01 | 2/4 | 56 | 1.3 | 4/4 | 174 | 1.29 | 8.59 | 2 | 230 | 2.52E−04 |
| RS2101435 | 1.28 | 2/3 | 33 | 1.3 | 3/3 | 2 | 2.13 | 8.58 | 2 | 223 | 2.57E−04 |
| RS9308931 | 1.33 | 1/2 | 107 | 1.23 | 2/2 | 50 | 1.44 | 8.54 | 2 | 219 | 2.68E−04 |
| RS2290547 | 1.1 | 1/3 | 91 | 1.39 | 3/3 | 143 | 1.26 | 8.5 | 2 | 244 | 2.70E−04 |
| RS10504709 | 1.58 | 1/3 | 86 | 1.31 | 3/3 | 143 | 1.26 | 8.47 | 2 | 242 | 2.78E−04 |
| RS10521979 | 1.45 | 4/4 | 207 | 1.27 | 0/0 | 0 | 0 | 13.51 | 1 | 246 | 2.91E−04 |
| RS10496647 | 2.38 | 1/3 | 33 | 1.21 | 3/3 | 216 | 1.31 | 8.37 | 2 | 247 | 3.04E−04 |
| RS8076457 | 1.27 | 2/4 | 71 | 1.3 | 4/4 | 8 | 1.7 | 8.28 | 2 | 245 | 3.31E−04 |
| RS297733 | 1.27 | 3/4 | 81 | 1.31 | 4/4 | 6 | 1.76 | 8.25 | 2 | 244 | 3.41E−04 |
| RS10513319 | 1.28 | 1/3 | 16 | 1.56 | 0/0 | 0 | 0 | 13.18 | 1 | 247 | 3.44E−04 |
| RS10496649 | 1.31 | 2/4 | 40 | 1.22 | 4/4 | 1 | 2.38 | 8.22 | 2 | 245 | 3.51E−04 |
| RS9325158 | 2.38 | 2/4 | 24 | 1.39 | 4/4 | 225 | 1.28 | 8.17 | 2 | 247 | 3.67E−04 |
| RS1817186 | 1.27 | 2/4 | 51 | 1.35 | 4/4 | 2 | 2.06 | 8.16 | 2 | 247 | 3.70E−04 |
| RS346421 | 1.26 | 3/4 | 45 | 1.45 | 4/4 | 1 | 1.57 | 8.15 | 2 | 244 | 3.75E−04 |
| RS3770899 | 1.43 | 1/3 | 34 | 1.49 | 3/3 | 210 | 1.27 | 8.13 | 2 | 242 | 3.83E−04 |
| RS10506790 | 1.4 | 1/3 | 40 | 1.47 | 3/3 | 208 | 1.26 | 8.1 | 2 | 247 | 3.92E−04 |
| RS1749541 | 1.26 | 2/4 | 106 | 1.29 | 4/4 | 21 | 1.54 | 8.06 | 2 | 240 | 4.09E−04 |
| RS1935229 | 1.47 | 4/4 | 215 | 1.27 | 0/0 | 0 | 0 | 12.76 | 1 | 246 | 4.26E−04 |
| RS250388 | 1.38 | 1/2 | 53 | 1.43 | 2/2 | 185 | 1.25 | 7.99 | 2 | 241 | 4.37E−04 |
| RS4073625 | 1.98 | 2/4 | 68 | 1.29 | 4/4 | 177 | 1.29 | 7.98 | 2 | 245 | 4.39E−04 |
| RS4770403 | 1.61 | 1/3 | 48 | 1.44 | 3/3 | 200 | 1.26 | 7.96 | 2 | 247 | 4.47E−04 |
| RS2157768 | 1.28 | 1/3 | 15 | 1.56 | 3/3 | 1 | 0.76 | 7.96 | 2 | 246 | 4.47E−04 |
| RS10514844 | 1.69 | 3/3 | 241 | 1.29 | 0/0 | 0 | 0 | 12.65 | 1 | 246 | 4.50E−04 |
| RS10484205 | 1.18 | 1/3 | 90 | 1.39 | 3/3 | 145 | 1.25 | 7.92 | 2 | 247 | 4.64E−04 |
| RS7897663 | 1.37 | 1/3 | 97 | 1.21 | 3/3 | 28 | 1.26 | 7.87 | 2 | 245 | 4.87E−04 |
| RS2278016 | 1.72 | 2/4 | 74 | 1.34 | 4/4 | 164 | 1.26 | 7.87 | 2 | 241 | 4.89E−04 |
| RS9303347 | 0.76 | 1/3 | 15 | 1.55 | 3/3 | 228 | 1.28 | 7.87 | 2 | 241 | 4.89E−04 |
| RS1011439 | 0.76 | 1/3 | 15 | 1.56 | 3/3 | 234 | 1.28 | 7.86 | 2 | 247 | 4.91E−04 |
| RS10494663 | 1.75 | 1/3 | 51 | 1.22 | 3/3 | 188 | 1.31 | 7.85 | 2 | 241 | 4.98E−04 |
| RS3218491 | 1.72 | 4/4 | 238 | 1.29 | 0/0 | 0 | 0 | 12.42 | 1 | 242 | 5.08E−04 |
| RS1527420 | 1.28 | 1/2 | 45 | 1.3 | 2/2 | 5 | 1.82 | 7.8 | 2 | 230 | 5.28E−04 |
| RS10509929 | 1.94 | 2/3 | 49 | 1.34 | 3/3 | 187 | 1.28 | 7.79 | 2 | 236 | 5.29E−04 |
| RS10508378 | 2.38 | 2/4 | 16 | 1.19 | 4/4 | 233 | 1.3 | 7.74 | 2 | 247 | 5.49E−04 |
| RS2413809 | 1.26 | 2/3 | 118 | 1.28 | 3/3 | 25 | 1.51 | 7.63 | 2 | 242 | 6.12E−04 |
| RS10508940 | 1.28 | 2/4 | 78 | 1.28 | 4/4 | 11 | 1.64 | 7.62 | 2 | 246 | 6.15E−04 |
| RS9284617 | 1.45 | 3/3 | 208 | 1.27 | 0/0 | 0 | 0 | 12.03 | 1 | 247 | 6.17E−04 |
| RS788005 | 1.31 | 2/4 | 64 | 1.24 | 4/4 | 12 | 1.61 | 7.62 | 2 | 217 | 6.33E−04 |
| RS2056247 | 1.61 | 3/4 | 78 | 1.35 | 4/4 | 164 | 1.25 | 7.58 | 2 | 247 | 6.38E−04 |
| RS10495774 | 1.63 | 2/4 | 76 | 1.26 | 4/4 | 161 | 1.29 | 7.58 | 2 | 245 | 6.40E−04 |
| RS10484317 | 1.28 | 2/3 | 19 | 1.34 | 3/3 | 2 | 2.08 | 7.57 | 2 | 243 | 6.47E−04 |
| RS10517496 | 2.04 | 2/4 | 38 | 1.22 | 4/4 | 204 | 1.3 | 7.55 | 2 | 241 | 6.60E−04 |
| RS10485111 | 1.26 | 2/4 | 56 | 1.39 | 4/4 | 4 | 1.68 | 7.54 | 2 | 243 | 6.65E−04 |
| RS2748324 | 1.3 | 2/4 | 33 | 1.22 | 4/4 | 4 | 1.82 | 7.53 | 2 | 243 | 6.72E−04 |
| RS4405428 | 1.29 | 2/4 | 54 | 1.27 | 4/4 | 2 | 2.08 | 7.52 | 2 | 243 | 6.78E−04 |
| RS1044045 | 1.35 | 1/3 | 68 | 1.19 | 3/3 | 9 | 1.21 | 7.5 | 2 | 239 | 6.93E−04 |
| RS176435 | 1.29 | 2/4 | 51 | 1.26 | 4/4 | 8 | 1.69 | 7.5 | 2 | 235 | 6.96E−04 |
| RS10513351 | 1.22 | 3/4 | 117 | 1.38 | 4/4 | 43 | 1.25 | 7.5 | 2 | 224 | 7.03E−04 |
| RS3766988 | 1.69 | 2/4 | 51 | 1.25 | 4/4 | 179 | 1.29 | 7.48 | 2 | 235 | 7.09E−04 |
| RS8068574 | 1.28 | 1/3 | 80 | 1.27 | 3/3 | 15 | 1.59 | 7.47 | 2 | 243 | 7.11E−04 |
| RS10483457 | 1.28 | 1/3 | 30 | 1.37 | 3/3 | 2 | 2.04 | 7.46 | 2 | 246 | 7.16E−04 |
| RS879780 | 2.38 | 2/4 | 27 | 1.22 | 4/4 | 218 | 1.3 | 7.45 | 2 | 243 | 7.24E−04 |
| RS10513301 | 1.25 | 2/4 | 68 | 1.41 | 4/4 | 7 | 1.33 | 7.41 | 2 | 245 | 7.51E−04 |
| RS4121693 | 1.25 | 2/4 | 100 | 1.38 | 4/4 | 113 | 1.23 | 7.42 | 2 | 234 | 7.51E−04 |
| RS10508059 | 1.25 | 2/4 | 65 | 1.42 | 4/4 | 8 | 1.25 | 7.41 | 2 | 241 | 7.53E−04 |
| RS1878144 | 1.3 | 3/4 | 48 | 1.24 | 4/4 | 5 | 1.77 | 7.41 | 2 | 237 | 7.56E−04 |
| RS10517504 | 2.04 | 1/3 | 28 | 1.21 | 3/3 | 204 | 1.3 | 7.41 | 2 | 231 | 7.60E−04 |
| RS1356216 | 1.29 | 3/4 | 48 | 1.24 | 4/4 | 5 | 1.77 | 7.39 | 2 | 245 | 7.65E−04 |
| RS2127258 | 1.85 | 2/4 | 39 | 1.38 | 4/4 | 206 | 1.27 | 7.37 | 2 | 245 | 7.80E−04 |
| RS1226489 | 2.26 | 2/4 | 8 | 1.5 | 4/4 | 235 | 1.28 | 7.37 | 2 | 241 | 7.82E−04 |
| RS877984 | 1.21 | 1/4 | 94 | 1.37 | 4/4 | 36 | 1.18 | 7.45 | 2 | 175 | 7.85E−04 |
| RS6735220 | 1.29 | 2/4 | 41 | 1.27 | 4/4 | 2 | 2.09 | 7.36 | 2 | 247 | 7.86E−04 |
| RS3745718 | 1.37 | 1/3 | 125 | 1.23 | 3/3 | 48 | 1.36 | 7.36 | 2 | 247 | 7.86E−04 |
| RS9303346 | 0.76 | 1/4 | 14 | 1.56 | 4/4 | 233 | 1.28 | 7.36 | 2 | 245 | 7.87E−04 |
| RS877345 | 1.3 | 1/2 | 42 | 1.28 | 2/2 | 3 | 1.95 | 7.35 | 2 | 228 | 8.07E−04 |
| RS973916 | 1.3 | 2/4 | 66 | 1.25 | 4/4 | 6 | 1.73 | 7.31 | 2 | 239 | 8.29E−04 |
| RS1371077 | 1.33 | 2/4 | 63 | 1.21 | 4/4 | 1 | 2.08 | 7.29 | 2 | 241 | 8.43E−04 |
| RS1013401 | 1.38 | 1/3 | 114 | 1.22 | 3/3 | 36 | 1.27 | 7.29 | 2 | 232 | 8.50E−04 |
| RS33375 | 1.58 | 1/3 | 49 | 1.41 | 3/3 | 179 | 1.26 | 7.29 | 2 | 231 | 8.51E−04 |
| RS10490353 | 1.3 | 2/3 | 45 | 1.25 | 3/3 | 2 | 2.07 | 7.27 | 2 | 247 | 8.55E−04 |
| RS10517616 | 1.38 | 2/4 | 115 | 1.23 | 4/4 | 24 | 1.24 | 7.26 | 2 | 246 | 8.64E−04 |
| RS716224 | 1.57 | 1/3 | 69 | 1.19 | 3/3 | 173 | 1.33 | 7.26 | 2 | 244 | 8.66E−04 |
| RS10497783 | 2.09 | 1/4 | 35 | 1.28 | 4/4 | 209 | 1.29 | 7.26 | 2 | 243 | 8.66E−04 |
| RS9304301 | 1.3 | 2/4 | 19 | 1.14 | 4/4 | 1 | 2.2 | 7.26 | 2 | 243 | 8.66E−04 |
| RS4646981 | 1.61 | 3/3 | 239 | 1.28 | 0/0 | 0 | 0 | 11.36 | 1 | 247 | 8.71E−04 |
| RS1535053 | 1.28 | 1/3 | 95 | 1.28 | 3/3 | 16 | 1.57 | 7.25 | 2 | 238 | 8.78E−04 |
| RS4146127 | 1.26 | 1/3 | 72 | 1.37 | 3/3 | 4 | 1.7 | 7.24 | 2 | 241 | 8.84E−04 |
| RS10519371 | 1.18 | 3/4 | 118 | 1.34 | 4/4 | 52 | 1.34 | 7.24 | 2 | 236 | 8.88E−04 |
| RS10509698 | 2.38 | 1/3 | 12 | 1.38 | 3/3 | 236 | 1.29 | 7.23 | 2 | 246 | 8.89E−04 |
| RS3218177 | 2.26 | 1/3 | 46 | 1.22 | 3/3 | 200 | 1.31 | 7.23 | 2 | 244 | 8.90E−04 |
| RS7577835 | 1.62 | 2/4 | 69 | 1.24 | 4/4 | 171 | 1.3 | 7.22 | 2 | 247 | 8.97E−04 |
| RS9312013 | 1.29 | 3/4 | 11 | 1.6 | 0/0 | 0 | 0 | 11.29 | 1 | 232 | 9.11E−04 |
| RS10500668 | 2.2 | 2/4 | 29 | 1.18 | 4/4 | 220 | 1.31 | 7.2 | 2 | 247 | 9.14E−04 |
| RS2670607 | 1.93 | 1/4 | 44 | 1.32 | 4/4 | 199 | 1.28 | 7.2 | 2 | 243 | 9.17E−04 |
| RS1550740 | 2.38 | 2/4 | 20 | 1.36 | 4/4 | 223 | 1.29 | 7.2 | 2 | 241 | 9.18E−04 |
| RS6990997 | 1.47 | 2/4 | 39 | 1.45 | 4/4 | 202 | 1.26 | 7.15 | 2 | 244 | 9.60E−04 |
| RS10506265 | 2.38 | 2/4 | 26 | 1.34 | 4/4 | 223 | 1.29 | 7.13 | 2 | 247 | 9.76E−04 |
| RS10487745 | 2.02 | 1/2 | 12 | 1.16 | 2/2 | 203 | 1.29 | 7.16 | 2 | 214 | 9.77E−04 |
| RS10494664 | 1.3 | 1/2 | 59 | 1.24 | 2/2 | 5 | 1.75 | 7.11 | 2 | 245 | 9.96E−04 |
| RS10509702 | 1.29 | 1/3 | 10 | 1.38 | 3/3 | 1 | 2.38 | 7.11 | 2 | 245 | 9.96E−04 |
| RS4793547 | 1.18 | 2/4 | 95 | 1.34 | 4/4 | 66 | 1.2 | 7.14 | 2 | 194 | 1.02E−03 |
| RS4131522 | 1.27 | 2/4 | 17 | 1.55 | 4/4 | 2 | 1.1 | 7.09 | 2 | 236 | 1.02E−03 |
| RS7536312 | 1.75 | 1/3 | 67 | 1.24 | 3/3 | 178 | 1.3 | 7.08 | 2 | 247 | 1.02E−03 |
| RS1428250 | 1.28 | 1/2 | 14 | 1.55 | 0/0 | 0 | 0 | 11.03 | 1 | 230 | 1.04E−03 |
| RS7718000 | 1.74 | 3/3 | 241 | 1.29 | 0/0 | 0 | 0 | 11 | 1 | 244 | 1.05E−03 |
| RS2371319 | 2.02 | 2/4 | 18 | 1.19 | 4/4 | 230 | 1.3 | 7.05 | 2 | 247 | 1.05E−03 |
| RS10516142 | 1.29 | 2/4 | 6 | 1.4 | 4/4 | 1 | 2.38 | 7.05 | 2 | 247 | 1.05E−03 |
| RS7597348 | 1.49 | 2/4 | 107 | 1.26 | 4/4 | 113 | 1.29 | 7.05 | 2 | 246 | 1.05E−03 |
| RS10509161 | 1.92 | 1/3 | 34 | 1.4 | 3/3 | 210 | 1.27 | 7.05 | 2 | 243 | 1.06E−03 |
| RS2827082 | 1.78 | 2/4 | 82 | 1.28 | 4/4 | 154 | 1.28 | 7.05 | 2 | 238 | 1.06E−03 |
| RS10491068 | 1.29 | 2/3 | 13 | 1.36 | 3/3 | 1 | 2.38 | 7.04 | 2 | 247 | 1.06E−03 |
| RS190788 | 1.29 | 2/3 | 16 | 1.35 | 3/3 | 1 | 2.38 | 7.04 | 2 | 247 | 1.06E−03 |
| RS1023431 | 1.27 | 4/4 | 32 | 1.46 | 0/0 | 0 | 0 | 10.96 | 1 | 244 | 1.07E−03 |
| RS113318 | 1.89 | 2/4 | 93 | 1.26 | 4/4 | 147 | 1.32 | 7.02 | 2 | 240 | 1.09E−03 |
| RS4131441 | 1.57 | 1/3 | 113 | 1.29 | 3/3 | 116 | 1.27 | 7.01 | 2 | 242 | 1.10E−03 |
| RS1275637 | 1.26 | 2/4 | 67 | 1.4 | 0/0 | 0 | 0 | 10.9 | 1 | 243 | 1.11E−03 |
| RS953681 | 1.3 | 1/3 | 54 | 1.23 | 3/3 | 5 | 1.74 | 6.99 | 2 | 247 | 1.11E−03 |
| RS381765 | 1.29 | 2/4 | 16 | 1.25 | 4/4 | 1 | 2.38 | 6.99 | 2 | 246 | 1.12E−03 |
| RS1226491 | 2.26 | 1/3 | 12 | 1.45 | 3/3 | 237 | 1.28 | 6.97 | 2 | 247 | 1.14E−03 |
| RS10509119 | 1.3 | 1/3 | 48 | 1.26 | 3/3 | 2 | 2.06 | 6.96 | 2 | 247 | 1.15E−03 |
| RS6988377 | 1.82 | 1/4 | 56 | 1.33 | 4/4 | 188 | 1.28 | 6.95 | 2 | 245 | 1.16E−03 |
| RS7665090 | 1.25 | 2/4 | 109 | 1.37 | 4/4 | 67 | 1.21 | 6.96 | 2 | 230 | 1.16E−03 |
| RS10509160 | 1.92 | 2/3 | 39 | 1.39 | 3/3 | 209 | 1.27 | 6.92 | 2 | 247 | 1.19E−03 |
| RS1332925 | 1.29 | 1/3 | 32 | 1.32 | 3/3 | 3 | 1.92 | 6.9 | 2 | 246 | 1.21E−03 |
| RS10516867 | 2.38 | 1/3 | 48 | 1.26 | 3/3 | 192 | 1.3 | 6.9 | 2 | 238 | 1.22E−03 |
| RS9285122 | 1.64 | 4/4 | 241 | 1.28 | 0/0 | 0 | 0 | 10.7 | 1 | 247 | 1.22E−03 |
| RS2150468 | 1.28 | 3/4 | 8 | 1.64 | 0/0 | 0 | 0 | 10.7 | 1 | 247 | 1.22E−03 |
| RS9284616 | 1.27 | 2/4 | 32 | 1.45 | 0/0 | 0 | 0 | 10.7 | 1 | 238 | 1.23E−03 |
| RS2969001 | 1.25 | 2/3 | 119 | 1.28 | 3/3 | 38 | 1.46 | 6.88 | 2 | 247 | 1.24E−03 |
| RS7794555 | 1.27 | 2/4 | 34 | 1.45 | 0/0 | 0 | 0 | 10.68 | 1 | 246 | 1.24E−03 |
| RS10495785 | 1.28 | 1/3 | 41 | 1.28 | 3/3 | 4 | 1.82 | 6.88 | 2 | 235 | 1.25E−03 |
| RS10492506 | 2.26 | 2/4 | 5 | 1.06 | 4/4 | 244 | 1.3 | 6.87 | 2 | 247 | 1.25E−03 |
| RS723043 | 1.21 | 3/4 | 117 | 1.3 | 4/4 | 36 | 1.42 | 6.89 | 2 | 219 | 1.25E−03 |
| RS2323936 | 1.64 | 4/4 | 242 | 1.29 | 0/0 | 0 | 0 | 10.62 | 1 | 248 | 1.28E−03 |
| RS2323937 | 1.29 | 1/4 | 8 | 1.64 | 0/0 | 0 | 0 | 10.62 | 1 | 248 | 1.28E−03 |
| RS1851006 | 1.19 | 2/4 | 66 | 1.26 | 4/4 | 73 | 1.38 | 6.91 | 2 | 181 | 1.28E−03 |
| RS10509705 | 2.38 | 2/4 | 12 | 1.34 | 4/4 | 237 | 1.29 | 6.84 | 2 | 247 | 1.28E−03 |
| RS10517294 | 1.29 | 1/3 | 33 | 1.32 | 3/3 | 1 | 2.38 | 6.84 | 2 | 246 | 1.29E−03 |
| RS6727480 | 1.53 | 2/4 | 82 | 1.25 | 4/4 | 146 | 1.3 | 6.83 | 2 | 243 | 1.30E−03 |
| RS2169942 | 1.27 | 1/3 | 37 | 1.37 | 3/3 | 3 | 1.85 | 6.83 | 2 | 243 | 1.30E−03 |
| RS10499227 | 1.1 | 1/2 | 28 | 1.46 | 2/2 | 172 | 1.28 | 6.86 | 2 | 206 | 1.31E−03 |
| RS1577879 | 1.27 | 2/4 | 59 | 1.33 | 4/4 | 15 | 1.55 | 6.82 | 2 | 234 | 1.32E−03 |
| RS1029233 | 1.15 | 1/2 | 85 | 1.39 | 2/2 | 139 | 1.27 | 6.81 | 2 | 244 | 1.32E−03 |
| RS7571668 | 1.32 | 2/4 | 112 | 1.24 | 4/4 | 22 | 1.49 | 6.8 | 2 | 237 | 1.34E−03 |
| RS10514845 | 1.64 | 4/4 | 240 | 1.29 | 0/0 | 0 | 0 | 10.52 | 1 | 246 | 1.34E−03 |
| RS4775359 | 1.3 | 2/4 | 53 | 1.27 | 4/4 | 1 | 2.38 | 6.79 | 2 | 246 | 1.35E−03 |
| RS1889226 | 1.29 | 2/4 | 23 | 1.29 | 4/4 | 1 | 2.38 | 6.79 | 2 | 240 | 1.35E−03 |
| RS10517865 | 1.28 | 2/4 | 47 | 1.29 | 4/4 | 10 | 1.64 | 6.77 | 2 | 238 | 1.38E−03 |
| RS10516865 | 1.29 | 3/4 | 5 | 1.72 | 0/0 | 0 | 0 | 10.46 | 1 | 248 | 1.39E−03 |
| RS1004246 | 1.31 | 1/3 | 106 | 1.35 | 3/3 | 37 | 1.14 | 6.77 | 2 | 233 | 1.39E−03 |
| RS10510714 | 1.3 | 1/3 | 15 | 1.2 | 3/3 | 2 | 2.02 | 6.75 | 2 | 247 | 1.40E−03 |
| RS4143188 | 2.38 | 1/2 | 34 | 1.31 | 2/2 | 215 | 1.29 | 6.75 | 2 | 247 | 1.40E−03 |
| RS340686 | 1.35 | 2/4 | 83 | 1.21 | 4/4 | 12 | 1.18 | 6.74 | 2 | 246 | 1.41E−03 |
| RS10486650 | 2.38 | 1/3 | 8 | 1.25 | 3/3 | 240 | 1.29 | 6.74 | 2 | 246 | 1.41E−03 |
| RS10499017 | 1.27 | 2/3 | 124 | 1.27 | 3/3 | 30 | 1.48 | 6.74 | 2 | 243 | 1.42E−03 |
| RS10517183 | 1.67 | 2/4 | 77 | 1.27 | 4/4 | 164 | 1.29 | 6.73 | 2 | 246 | 1.43E−03 |
| RS10494826 | 1.19 | 2/4 | 73 | 1.4 | 4/4 | 163 | 1.25 | 6.73 | 2 | 244 | 1.43E−03 |
| RS2254162 | 1.38 | 1/4 | 52 | 1.4 | 4/4 | 113 | 1.24 | 6.8 | 2 | 174 | 1.43E−03 |
| RS1887889 | 1.29 | 2/3 | 123 | 1.25 | 3/3 | 37 | 1.46 | 6.72 | 2 | 247 | 1.44E−03 |
| RS1013459 | 1.3 | 1/3 | 35 | 1.27 | 3/3 | 1 | 2.38 | 6.72 | 2 | 244 | 1.44E−03 |
| RS4128923 | 1.89 | 2/4 | 75 | 1.32 | 4/4 | 168 | 1.27 | 6.71 | 2 | 243 | 1.46E−03 |
| RS2072506 | 1.27 | 1/4 | 31 | 1.46 | 0/0 | 0 | 0 | 10.34 | 1 | 243 | 1.48E−03 |
| RS2034022 | 1.38 | 2/4 | 113 | 1.25 | 4/4 | 32 | 1.21 | 6.69 | 2 | 239 | 1.49E−03 |
| RS924993 | 2.38 | 1/3 | 32 | 1.28 | 3/3 | 217 | 1.29 | 6.68 | 2 | 247 | 1.50E−03 |
| RS10506869 | 2.38 | 2/3 | 32 | 1.3 | 3/3 | 217 | 1.29 | 6.68 | 2 | 247 | 1.50E−03 |
| RS10505540 | 2.15 | 2/4 | 19 | 1.44 | 4/4 | 230 | 1.28 | 6.67 | 2 | 247 | 1.51E−03 |
| RS265056 | 1.29 | 2/3 | 36 | 1.3 | 3/3 | 1 | 2.38 | 6.67 | 2 | 245 | 1.51E−03 |
| RS10495520 | 1.77 | 2/4 | 56 | 1.23 | 4/4 | 188 | 1.3 | 6.66 | 2 | 245 | 1.53E−03 |
| RS6856098 | 1.58 | 2/4 | 75 | 1.33 | 4/4 | 159 | 1.26 | 6.66 | 2 | 242 | 1.53E−03 |
| RS10503419 | 1.28 | 1/2 | 70 | 1.3 | 2/2 | 4 | 1.84 | 6.67 | 2 | 228 | 1.53E−03 |
| RS439269 | 1.26 | 2/4 | 48 | 1.39 | 4/4 | 5 | 1.64 | 6.65 | 2 | 246 | 1.54E−03 |
| RS720327 | 1.29 | 1/2 | 31 | 1.3 | 2/2 | 1 | 2.38 | 6.65 | 2 | 242 | 1.54E−03 |
| RS10513299 | 1.26 | 1/4 | 58 | 1.38 | 4/4 | 3 | 1.76 | 6.64 | 2 | 243 | 1.56E−03 |
| RS1917952 | 1.19 | 2/4 | 101 | 1.35 | 4/4 | 52 | 1.34 | 6.65 | 2 | 225 | 1.56E−03 |
| RS10483252 | 2.38 | 2/4 | 42 | 1.29 | 4/4 | 205 | 1.29 | 6.63 | 2 | 245 | 1.57E−03 |
| RS6733858 | 1.23 | 1/3 | 126 | 1.37 | 3/3 | 40 | 1.23 | 6.63 | 2 | 244 | 1.57E−03 |
| RS1429130 | 1.28 | 1/3 | 25 | 1.48 | 0/0 | 0 | 0 | 10.21 | 1 | 232 | 1.59E−03 |
| RS3118650 | 1.28 | 1/3 | 14 | 1.54 | 0/0 | 0 | 0 | 10.19 | 1 | 246 | 1.60E−03 |
| RS1959736 | 1.66 | 3/4 | 35 | 1.29 | 4/4 | 186 | 1.28 | 6.62 | 2 | 226 | 1.61E−03 |
| RS10511852 | 1.28 | 2/4 | 15 | 1.54 | 0/0 | 0 | 0 | 10.17 | 1 | 244 | 1.61E−03 |
| RS10508692 | 1.72 | 3/3 | 241 | 1.29 | 0/0 | 0 | 0 | 10.12 | 1 | 244 | 1.66E−03 |
| RS2147085 | 1.43 | 1/3 | 130 | 1.26 | 3/3 | 64 | 1.25 | 6.57 | 2 | 242 | 1.67E−03 |
| RS4611835 | 1.92 | 1/2 | 19 | 1.44 | 2/2 | 220 | 1.28 | 6.57 | 2 | 238 | 1.67E−03 |
| RS715428 | 1.56 | 2/2 | 237 | 1.28 | 0/0 | 0 | 0 | 10.09 | 1 | 247 | 1.68E−03 |
| RS10516872 | 1.3 | 1/3 | 24 | 1.31 | 3/3 | 1 | 2.38 | 6.56 | 2 | 240 | 1.68E−03 |
| RS9323955 | 1.17 | 1/3 | 123 | 1.34 | 3/3 | 64 | 1.33 | 6.56 | 2 | 240 | 1.68E−03 |
| RS1844510 | 1.32 | 1/3 | 121 | 1.24 | 3/3 | 56 | 1.41 | 6.55 | 2 | 238 | 1.70E−03 |
| RS1204014 | 1.29 | 2/4 | 19 | 1.22 | 4/4 | 2 | 2.02 | 6.53 | 2 | 246 | 1.72E−03 |
| RS2785949 | 1.26 | 1/3 | 79 | 1.29 | 3/3 | 31 | 1.47 | 6.54 | 2 | 231 | 1.73E−03 |
| RS2721304 | 1.27 | 1/3 | 56 | 1.41 | 0/0 | 0 | 0 | 10.03 | 1 | 240 | 1.74E−03 |
| RS10508096 | 1.05 | 2/4 | 68 | 1.39 | 4/4 | 173 | 1.27 | 6.52 | 2 | 244 | 1.74E−03 |
| RS10510100 | 1.3 | 2/4 | 12 | 1.15 | 4/4 | 3 | 1.84 | 6.51 | 2 | 245 | 1.76E−03 |
| RS9287120 | 1.75 | 2/3 | 32 | 1.23 | 3/3 | 181 | 1.3 | 6.53 | 2 | 215 | 1.77E−03 |
| RS1818711 | 1.25 | 1/3 | 128 | 1.28 | 3/3 | 41 | 1.45 | 6.49 | 2 | 246 | 1.79E−03 |
| RS10497689 | 1.71 | 3/3 | 245 | 1.29 | 0/0 | 0 | 0 | 9.95 | 1 | 248 | 1.81E−03 |
| RS10492139 | 1.32 | 2/4 | 85 | 1.39 | 4/4 | 149 | 1.24 | 6.48 | 2 | 245 | 1.81E−03 |
| RS3886738 | 1.92 | 1/3 | 35 | 1.38 | 3/3 | 208 | 1.27 | 6.48 | 2 | 242 | 1.81E−03 |
| RS10494214 | 1.3 | 2/4 | 34 | 1.28 | 4/4 | 1 | 2.38 | 6.48 | 2 | 237 | 1.82E−03 |
| RS6798797 | 1.3 | 1/3 | 14 | 1.21 | 3/3 | 2 | 2.02 | 6.46 | 2 | 242 | 1.85E−03 |
| RS935313 | 1.28 | 1/2 | 91 | 1.38 | 2/2 | 84 | 1.22 | 6.47 | 2 | 224 | 1.85E−03 |
| RS1464452 | 1.25 | 1/3 | 44 | 1.44 | 3/3 | 190 | 1.26 | 6.45 | 2 | 238 | 1.87E−03 |
| RS2277456 | 1.26 | 2/4 | 28 | 1.46 | 4/4 | 3 | 1.58 | 6.47 | 2 | 209 | 1.88E−03 |
| RS1367719 | 1.25 | 1/2 | 103 | 1.37 | 2/2 | 22 | 1.19 | 6.44 | 2 | 246 | 1.88E−03 |
| RS7752110 | 1.65 | 2/4 | 66 | 1.3 | 4/4 | 173 | 1.28 | 6.43 | 2 | 245 | 1.90E−03 |
| RS4918842 | 1.63 | 2/4 | 72 | 1.25 | 4/4 | 167 | 1.3 | 6.43 | 2 | 245 | 1.90E−03 |
| RS1025748 | 1.31 | 1/2 | 72 | 1.23 | 2/2 | 16 | 1.52 | 6.43 | 2 | 239 | 1.91E−03 |
| RS10514770 | 1.36 | 1/3 | 111 | 1.22 | 3/3 | 33 | 1.32 | 6.42 | 2 | 245 | 1.92E−03 |
| RS1442799 | 1.29 | 2/4 | 33 | 1.32 | 4/4 | 2 | 2.04 | 6.41 | 2 | 247 | 1.93E−03 |
| RS2405708 | 1.35 | 1/3 | 67 | 1.37 | 3/3 | 82 | 1.2 | 6.45 | 2 | 197 | 1.94E−03 |
| RS7413158 | 1.71 | 1/2 | 64 | 1.26 | 2/2 | 180 | 1.3 | 6.4 | 2 | 247 | 1.95E−03 |
| RS1407466 | 1.25 | 1/3 | 73 | 1.38 | 3/3 | 10 | 1.46 | 6.4 | 2 | 245 | 1.95E−03 |
| RS2254764 | 1.9 | 3/4 | 37 | 1.31 | 4/4 | 210 | 1.29 | 6.39 | 2 | 247 | 1.97E−03 |
| RS539254 | 1.25 | 1/3 | 64 | 1.38 | 3/3 | 13 | 1.5 | 6.41 | 2 | 213 | 1.98E−03 |
| RS2333821 | 1.23 | 2/4 | 106 | 1.33 | 4/4 | 20 | 1.47 | 6.39 | 2 | 235 | 1.98E−03 |
| RS1016579 | 1.3 | 1/3 | 24 | 1.49 | 3/3 | 194 | 1.27 | 6.39 | 2 | 217 | 2.01E−03 |
| RS10484518 | 1.26 | 3/4 | 104 | 1.38 | 4/4 | 114 | 1.23 | 6.37 | 2 | 240 | 2.02E−03 |
| RS6989370 | 1.32 | 2/4 | 126 | 1.34 | 4/4 | 65 | 1.19 | 6.36 | 2 | 246 | 2.03E−03 |
| RS10505777 | 1.29 | 2/3 | 4 | 1.77 | 0/0 | 0 | 0 | 9.81 | 1 | 117 | 2.03E−03 |
| RS717806 | 1.48 | 1/4 | 100 | 1.35 | 4/4 | 129 | 1.24 | 6.36 | 2 | 237 | 2.04E−03 |
| RS1577302 | 1.66 | 2/4 | 35 | 1.2 | 4/4 | 198 | 1.3 | 6.36 | 2 | 236 | 2.04E−03 |
| RS1869733 | 1.27 | 2/4 | 76 | 1.39 | 4/4 | 11 | 1.11 | 6.35 | 2 | 245 | 2.05E−03 |
| RS1217656 | 2.2 | 1/2 | 38 | 1.21 | 2/2 | 209 | 1.31 | 6.34 | 2 | 245 | 2.07E−03 |
| RS2838000 | 1.49 | 1/3 | 98 | 1.24 | 3/3 | 129 | 1.31 | 6.34 | 2 | 244 | 2.07E−03 |
| RS6741304 | 1.47 | 2/4 | 102 | 1.31 | 4/4 | 117 | 1.24 | 6.34 | 2 | 241 | 2.07E−03 |
| RS2223163 | 1.2 | 2/4 | 116 | 1.36 | 4/4 | 106 | 1.23 | 6.34 | 2 | 233 | 2.08E−03 |
| RS4952999 | 1.3 | 1/4 | 109 | 1.36 | 4/4 | 100 | 1.22 | 6.33 | 2 | 245 | 2.09E−03 |
| RS2973237 | 1.48 | 2/4 | 90 | 1.26 | 4/4 | 116 | 1.28 | 6.33 | 2 | 231 | 2.11E−03 |
| RS3124806 | 1.45 | 3/3 | 215 | 1.27 | 0/0 | 0 | 0 | 9.66 | 1 | 239 | 2.11E−03 |
| RS1485870 | 1.35 | 2/4 | 72 | 1.2 | 4/4 | 14 | 1.28 | 6.32 | 2 | 240 | 2.11E−03 |
| RS10518405 | 1.97 | 1/2 | 30 | 1.21 | 2/2 | 210 | 1.3 | 6.32 | 2 | 239 | 2.12E−03 |
| RS10497650 | 1.71 | 4/4 | 232 | 1.29 | 0/0 | 0 | 0 | 9.65 | 1 | 235 | 2.13E−03 |
| RS10488693 | 1.48 | 3/3 | 222 | 1.28 | 0/0 | 0 | 0 | 9.64 | 1 | 243 | 2.13E−03 |
| RS10507082 | 1.04 | 1/3 | 78 | 1.27 | 3/3 | 146 | 1.33 | 6.31 | 2 | 235 | 2.14E−03 |
| RS10510715 | 2.02 | 2/4 | 8 | 1.2 | 4/4 | 239 | 1.29 | 6.3 | 2 | 246 | 2.15E−03 |
| RS4684321 | 1.28 | 1/3 | 23 | 1.48 | 0/0 | 0 | 0 | 9.61 | 1 | 248 | 2.16E−03 |
| RS829612 | 1.32 | 2/4 | 111 | 1.22 | 4/4 | 105 | 1.36 | 6.29 | 2 | 246 | 2.17E−03 |
| RS10489925 | 1.33 | 2/4 | 87 | 1.38 | 4/4 | 137 | 1.24 | 6.3 | 2 | 231 | 2.17E−03 |
| RS735403 | 1.25 | 1/3 | 115 | 1.37 | 3/3 | 69 | 1.22 | 6.29 | 2 | 240 | 2.18E−03 |
| RS2217486 | 1.37 | 1/3 | 85 | 1.38 | 3/3 | 154 | 1.24 | 6.28 | 2 | 245 | 2.19E−03 |
| RS10485090 | 1.9 | 1/2 | 50 | 1.3 | 2/2 | 195 | 1.29 | 6.28 | 2 | 245 | 2.19E−03 |
| RS7181421 | 1.24 | 2/4 | 118 | 1.37 | 4/4 | 31 | 1.22 | 6.28 | 2 | 243 | 2.19E−03 |
| RS3964705 | 1.27 | 1/3 | 78 | 1.3 | 3/3 | 9 | 1.63 | 6.28 | 2 | 242 | 2.19E−03 |
| RS1935720 | 1.29 | 3/4 | 56 | 1.3 | 4/4 | 2 | 2.04 | 6.27 | 2 | 246 | 2.21E−03 |
| RS1433450 | 0.91 | 1/3 | 42 | 1.17 | 3/3 | 204 | 1.33 | 6.27 | 2 | 245 | 2.21E−03 |
| RS1452528 | 1.38 | 1/3 | 121 | 1.31 | 3/3 | 60 | 1.19 | 6.27 | 2 | 241 | 2.22E−03 |
| RS10486694 | 2.26 | 1/3 | 10 | 1.17 | 3/3 | 237 | 1.29 | 6.26 | 2 | 245 | 2.23E−03 |
| RS2089907 | 1.24 | 1/4 | 76 | 1.39 | 4/4 | 18 | 1.35 | 6.27 | 2 | 224 | 2.24E−03 |
| RS10484693 | 1.56 | 3/3 | 235 | 1.29 | 0/0 | 0 | 0 | 9.54 | 1 | 245 | 2.24E−03 |
| RS1922036 | 1.26 | 1/2 | 89 | 1.39 | 2/2 | 29 | 1.22 | 6.25 | 2 | 245 | 2.25E−03 |
| RS868691 | 1.28 | 2/4 | 26 | 1.39 | 4/4 | 3 | 1.82 | 6.24 | 2 | 237 | 2.29E−03 |
| RS745708 | 1.24 | 1/3 | 63 | 1.38 | 3/3 | 8 | 1.42 | 6.25 | 2 | 218 | 2.29E−03 |
| RS10502055 | 1.26 | 2/4 | 116 | 1.37 | 4/4 | 58 | 1.21 | 6.23 | 2 | 243 | 2.30E−03 |
| RS1369763 | 1.29 | 2/4 | 7 | 1.69 | 4/4 | 1 | 1.08 | 6.25 | 2 | 215 | 2.30E−03 |
| RS2825652 | 1.28 | 2/3 | 10 | 1.58 | 0/0 | 0 | 0 | 9.49 | 1 | 247 | 2.30E−03 |
| RS10521241 | 1.63 | 1/3 | 74 | 1.21 | 3/3 | 167 | 1.32 | 6.23 | 2 | 242 | 2.30E−03 |
| RS10486012 | 1.6 | 4/4 | 241 | 1.29 | 0/0 | 0 | 0 | 9.46 | 1 | 248 | 2.34E−03 |
| RS1852561 | 1.52 | 4/4 | 234 | 1.28 | 0/0 | 0 | 0 | 9.46 | 1 | 247 | 2.34E−03 |
| RS296032 | 1.11 | 2/3 | 83 | 1.38 | 3/3 | 152 | 1.26 | 6.21 | 2 | 240 | 2.35E−03 |
| RS10495667 | 1.7 | 3/3 | 244 | 1.29 | 0/0 | 0 | 0 | 9.45 | 1 | 247 | 2.35E−03 |
| RS950796 | 1.26 | 1/3 | 61 | 1.4 | 3/3 | 7 | 1.18 | 6.22 | 2 | 224 | 2.35E−03 |
| RS10510155 | 1.26 | 2/4 | 48 | 1.43 | 4/4 | 1 | 1.23 | 6.21 | 2 | 234 | 2.36E−03 |
| RS10511356 | 1.29 | 2/4 | 29 | 1.3 | 4/4 | 2 | 2.04 | 6.2 | 2 | 247 | 2.36E−03 |
| RS1025927 | 1.27 | 1/3 | 27 | 1.49 | 3/3 | 1 | 1.4 | 6.2 | 2 | 246 | 2.36E−03 |
| RS285098 | 1.44 | 2/3 | 107 | 1.25 | 3/3 | 94 | 1.28 | 6.2 | 2 | 240 | 2.37E−03 |
| RS9315749 | 1.17 | 2/3 | 65 | 1.38 | 3/3 | 124 | 1.26 | 6.22 | 2 | 213 | 2.37E−03 |
| RS3850079 | 1.18 | 1/2 | 111 | 1.36 | 2/2 | 109 | 1.24 | 6.2 | 2 | 238 | 2.37E−03 |
| RS340680 | 1.17 | 1/3 | 76 | 1.22 | 3/3 | 154 | 1.35 | 6.19 | 2 | 239 | 2.39E−03 |
| RS10520754 | 1.24 | 2/4 | 125 | 1.35 | 4/4 | 48 | 1.19 | 6.19 | 2 | 236 | 2.40E−03 |
| RS950016 | 1.27 | 2/4 | 27 | 1.46 | 0/0 | 0 | 0 | 9.39 | 1 | 245 | 2.43E−03 |
| RS1936671 | 1.24 | 2/4 | 95 | 1.37 | 4/4 | 13 | 1.38 | 6.17 | 2 | 244 | 2.43E−03 |
| RS1371076 | 1.29 | 1/3 | 101 | 1.22 | 3/3 | 124 | 1.36 | 6.17 | 2 | 243 | 2.43E−03 |
| RS719025 | 1.29 | 3/4 | 65 | 1.41 | 4/4 | 172 | 1.25 | 6.17 | 2 | 243 | 2.43E−03 |
| RS717694 | 1.16 | 2/4 | 88 | 1.22 | 4/4 | 146 | 1.35 | 6.17 | 2 | 239 | 2.44E−03 |
| RS2893569 | 1.28 | 1/3 | 7 | 1.64 | 0/0 | 0 | 0 | 9.39 | 1 | 232 | 2.44E−03 |
| RS641445 | 2.04 | 3/4 | 22 | 1.26 | 4/4 | 197 | 1.3 | 6.18 | 2 | 218 | 2.45E−03 |
| RS4697055 | 1.33 | 1/3 | 76 | 1.2 | 3/3 | 16 | 1.4 | 6.17 | 2 | 231 | 2.45E−03 |
| RS9318541 | 1.15 | 2/4 | 100 | 1.36 | 4/4 | 125 | 1.27 | 6.16 | 2 | 246 | 2.45E−03 |
| RS720613 | 1.27 | 2/4 | 74 | 1.31 | 4/4 | 12 | 1.58 | 6.17 | 2 | 229 | 2.46E−03 |
| RS1465135 | 1.24 | 1/3 | 79 | 1.38 | 3/3 | 21 | 1.28 | 6.17 | 2 | 220 | 2.47E−03 |
| RS295577 | 1.99 | 2/3 | 10 | 1.41 | 3/3 | 231 | 1.28 | 6.15 | 2 | 240 | 2.48E−03 |
| RS7574093 | 1.58 | 3/3 | 240 | 1.28 | 0/0 | 0 | 0 | 9.34 | 1 | 248 | 2.49E−03 |
| RS10517442 | 1.63 | 2/4 | 78 | 1.36 | 4/4 | 167 | 1.26 | 6.14 | 2 | 247 | 2.50E−03 |
| RS7768538 | 1.23 | 1/2 | 129 | 1.3 | 2/2 | 32 | 1.45 | 6.14 | 2 | 243 | 2.50E−03 |
| RS1566728 | 1.25 | 1/3 | 95 | 1.38 | 3/3 | 15 | 1.26 | 6.13 | 2 | 246 | 2.52E−03 |
| RS3805134 | 1.44 | 2/4 | 103 | 1.28 | 4/4 | 87 | 1.25 | 6.14 | 2 | 230 | 2.52E−03 |
| RS7075669 | 1.31 | 1/3 | 116 | 1.36 | 3/3 | 69 | 1.2 | 6.13 | 2 | 241 | 2.53E−03 |
| RS10502056 | 1.2 | 2/4 | 114 | 1.36 | 4/4 | 70 | 1.25 | 6.13 | 2 | 236 | 2.54E−03 |
| RS1385080 | 1.28 | 3/4 | 20 | 1.5 | 0/0 | 0 | 0 | 9.3 | 1 | 243 | 2.55E−03 |
| RS10507553 | 1.7 | 4/4 | 245 | 1.29 | 0/0 | 0 | 0 | 9.27 | 1 | 248 | 2.58E−03 |
| RS1411315 | 1.3 | 1/3 | 92 | 1.38 | 3/3 | 130 | 1.23 | 6.11 | 2 | 240 | 2.58E−03 |
| RS7139422 | 2.26 | 1/4 | 36 | 1.35 | 4/4 | 212 | 1.28 | 6.1 | 2 | 246 | 2.60E−03 |
| RS1235012 | 1.31 | 2/4 | 34 | 1.21 | 4/4 | 1 | 2.2 | 6.1 | 2 | 242 | 2.60E−03 |
| RS7174236 | 1.66 | 2/3 | 66 | 1.3 | 3/3 | 176 | 1.28 | 6.09 | 2 | 247 | 2.62E−03 |
| RS1993745 | 1.15 | 2/4 | 107 | 1.35 | 4/4 | 105 | 1.3 | 6.09 | 2 | 246 | 2.62E−03 |
| RS1341002 | 1.31 | 2/3 | 124 | 1.25 | 3/3 | 18 | 1.5 | 6.09 | 2 | 241 | 2.63E−03 |
| RS10498032 | 1.14 | 1/4 | 100 | 1.35 | 4/4 | 84 | 1.28 | 6.11 | 2 | 212 | 2.63E−03 |
| RS989177 | 1.56 | 2/4 | 40 | 1.29 | 4/4 | 159 | 1.27 | 6.11 | 2 | 211 | 2.63E−03 |
| RS1217654 | 1.31 | 2/4 | 36 | 1.22 | 4/4 | 1 | 2.2 | 6.08 | 2 | 237 | 2.66E−03 |
| RS7453920 | 1.45 | 1/3 | 123 | 1.3 | 3/3 | 84 | 1.24 | 6.08 | 2 | 236 | 2.66E−03 |
| RS1604613 | 1.36 | 2/4 | 123 | 1.31 | 4/4 | 66 | 1.19 | 6.08 | 2 | 233 | 2.67E−03 |
| RS548533 | 1.26 | 4/4 | 59 | 1.4 | 0/0 | 0 | 0 | 9.21 | 1 | 244 | 2.67E−03 |
| RS479554 | 1.4 | 3/3 | 187 | 1.26 | 0/0 | 0 | 0 | 9.21 | 1 | 244 | 2.67E−03 |
| RS4686384 | 1.35 | 1/3 | 120 | 1.23 | 3/3 | 23 | 1.41 | 6.07 | 2 | 244 | 2.67E−03 |
| RS10506626 | 1.49 | 1/3 | 117 | 1.32 | 3/3 | 112 | 1.24 | 6.07 | 2 | 244 | 2.67E−03 |
| RS198278 | 1.18 | 1/3 | 123 | 1.29 | 3/3 | 60 | 1.36 | 6.07 | 2 | 235 | 2.69E−03 |
| RS295525 | 1.99 | 2/4 | 9 | 1.41 | 4/4 | 239 | 1.29 | 6.06 | 2 | 247 | 2.70E−03 |
| RS1886452 | 1.25 | 1/4 | 79 | 1.39 | 4/4 | 8 | 1.38 | 6.06 | 2 | 242 | 2.70E−03 |
| RS2009373 | 1.35 | 2/4 | 125 | 1.24 | 4/4 | 74 | 1.38 | 6.06 | 2 | 240 | 2.71E−03 |
| RS6086149 | 1.26 | 1/3 | 95 | 1.32 | 3/3 | 9 | 1.6 | 6.05 | 2 | 243 | 2.73E−03 |
| RS10500986 | 1.26 | 2/3 | 72 | 1.34 | 3/3 | 11 | 1.54 | 6.06 | 2 | 225 | 2.73E−03 |
| RS10497776 | 1.29 | 1/3 | 5 | 1.7 | 0/0 | 0 | 0 | 9.16 | 1 | 247 | 2.74E−03 |
| RS2832726 | 1.3 | 1/3 | 134 | 1.25 | 3/3 | 38 | 1.44 | 6.04 | 2 | 247 | 2.75E−03 |
| RS10495519 | 1.63 | 1/3 | 62 | 1.22 | 3/3 | 176 | 1.31 | 6.04 | 2 | 241 | 2.76E−03 |
| RS10492135 | 1.35 | 2/4 | 84 | 1.38 | 4/4 | 152 | 1.24 | 6.03 | 2 | 246 | 2.78E−03 |
| RS10508840 | 1.12 | 1/2 | 55 | 1.41 | 2/2 | 187 | 1.27 | 6.03 | 2 | 245 | 2.78E−03 |
| RS167164 | 1.26 | 2/4 | 82 | 1.39 | 4/4 | 8 | 1.17 | 6.03 | 2 | 244 | 2.78E−03 |
| RS967220 | 1.02 | 3/4 | 62 | 1.22 | 4/4 | 143 | 1.35 | 6.05 | 2 | 207 | 2.80E−03 |
| RS10493306 | 1.73 | 2/4 | 73 | 1.26 | 4/4 | 171 | 1.3 | 6.02 | 2 | 246 | 2.80E−03 |
| RS2111826 | 1.16 | 3/3 | 208 | 1.32 | 0/0 | 0 | 0 | 9.11 | 1 | 245 | 2.81E−03 |
| RS722508 | 1.35 | 1/3 | 121 | 1.23 | 3/3 | 83 | 1.37 | 6.01 | 2 | 247 | 2.83E−03 |
| RS7220359 | 1.53 | 3/3 | 229 | 1.28 | 0/0 | 0 | 0 | 9.1 | 1 | 241 | 2.83E−03 |
| RS10490838 | 1.28 | 1/3 | 15 | 1.52 | 0/0 | 0 | 0 | 9.09 | 1 | 247 | 2.84E−03 |
| RS2069837 | 1.27 | 1/3 | 24 | 1.47 | 0/0 | 0 | 0 | 9.09 | 1 | 239 | 2.85E−03 |
| RS1485871 | 1.28 | 1/3 | 63 | 1.19 | 3/3 | 157 | 1.35 | 6 | 2 | 231 | 2.88E−03 |
| RS2113487 | 1.37 | 1/3 | 106 | 1.23 | 3/3 | 26 | 1.31 | 6.01 | 2 | 216 | 2.88E−03 |
| RS10519370 | 1.2 | 2/4 | 119 | 1.34 | 4/4 | 51 | 1.34 | 5.99 | 2 | 245 | 2.89E−03 |
| RS1905155 | 1.33 | 3/4 | 81 | 1.28 | 4/4 | 30 | 1.13 | 6 | 2 | 224 | 2.89E−03 |
| RS3827702 | 1.27 | 2/4 | 63 | 1.26 | 4/4 | 19 | 1.52 | 6.01 | 2 | 205 | 2.91E−03 |
| RS10500783 | 1.27 | 2/4 | 46 | 1.43 | 4/4 | 3 | 1.49 | 5.98 | 2 | 245 | 2.91E−03 |
| RS724334 | 1.27 | 2/4 | 63 | 1.34 | 4/4 | 8 | 1.62 | 5.98 | 2 | 242 | 2.92E−03 |
| RS6852538 | 1.2 | 1/3 | 117 | 1.33 | 3/3 | 52 | 1.35 | 5.97 | 2 | 245 | 2.94E−03 |
| RS6954168 | 1.29 | 2/4 | 7 | 1.63 | 0/0 | 0 | 0 | 9.02 | 1 | 246 | 2.95E−03 |
| RS10512680 | 1.42 | 1/3 | 108 | 1.26 | 3/3 | 59 | 1.26 | 5.98 | 2 | 226 | 2.95E−03 |
| RS10518649 | 1.29 | 2/3 | 66 | 1.28 | 3/3 | 2 | 2.02 | 5.96 | 2 | 247 | 2.97E−03 |
| RS2244327 | 1.25 | 2/4 | 136 | 1.35 | 4/4 | 25 | 1.16 | 5.96 | 2 | 247 | 2.97E−03 |
| RS1153350 | 1.85 | 1/2 | 66 | 1.25 | 2/2 | 181 | 1.3 | 5.96 | 2 | 247 | 2.97E−03 |
| RS4510935 | 1.59 | 2/4 | 62 | 1.37 | 4/4 | 181 | 1.26 | 5.96 | 2 | 246 | 2.97E−03 |
| RS1942578 | 1.2 | 2/4 | 109 | 1.27 | 4/4 | 85 | 1.37 | 5.96 | 2 | 242 | 2.97E−03 |
| RS953177 | 1.28 | 2/4 | 26 | 1.47 | 0/0 | 0 | 0 | 8.98 | 1 | 246 | 3.01E−03 |
| RS7701903 | 1.08 | 2/3 | 31 | 1.47 | 3/3 | 192 | 1.28 | 5.96 | 2 | 223 | 3.01E−03 |
| RS309274 | 1.26 | 1/3 | 104 | 1.37 | 3/3 | 107 | 1.23 | 5.95 | 2 | 235 | 3.01E−03 |
| RS1556082 | 1.38 | 1/3 | 81 | 1.38 | 3/3 | 160 | 1.25 | 5.94 | 2 | 245 | 3.03E−03 |
| RS2616170 | 1.33 | 1/4 | 105 | 1.22 | 4/4 | 107 | 1.36 | 5.94 | 2 | 241 | 3.03E−03 |
| RS10503626 | 1.96 | 1/3 | 19 | 1.39 | 3/3 | 228 | 1.28 | 5.93 | 2 | 246 | 3.05E−03 |
| RS2831853 | 1.31 | 2/3 | 10 | 1.02 | 0/0 | 0 | 0 | 8.95 | 1 | 244 | 3.06E−03 |
| RS2969004 | 1.45 | 3/4 | 104 | 1.29 | 4/4 | 86 | 1.25 | 5.94 | 2 | 226 | 3.06E−03 |
| RS10501160 | 2.26 | 1/3 | 24 | 1.37 | 3/3 | 217 | 1.29 | 5.93 | 2 | 239 | 3.07E−03 |
| RS752355 | 1.56 | 1/2 | 104 | 1.3 | 2/2 | 114 | 1.28 | 5.93 | 2 | 230 | 3.08E−03 |
| RS1372338 | 1.28 | 2/4 | 114 | 1.24 | 4/4 | 65 | 1.4 | 5.92 | 2 | 241 | 3.09E−03 |
| RS1931610 | 2.26 | 1/3 | 15 | 1.38 | 3/3 | 232 | 1.29 | 5.91 | 2 | 245 | 3.11E−03 |
| RS1641354 | 1.45 | 1/3 | 114 | 1.26 | 3/3 | 98 | 1.27 | 5.91 | 2 | 245 | 3.11E−03 |
| RS6919514 | 1.42 | 4/4 | 206 | 1.27 | 0/0 | 0 | 0 | 8.91 | 1 | 247 | 3.12E−03 |
| RS10498836 | 1.33 | 2/4 | 49 | 1.17 | 4/4 | 7 | 1.24 | 5.91 | 2 | 239 | 3.12E−03 |
| RS1381181 | 1.15 | 1/3 | 107 | 1.34 | 3/3 | 105 | 1.3 | 5.9 | 2 | 246 | 3.14E−03 |
| RS1881014 | 1.29 | 2/4 | 17 | 1.52 | 0/0 | 0 | 0 | 8.91 | 1 | 227 | 3.15E−03 |
| RS10501161 | 1.28 | 2/4 | 30 | 1.35 | 4/4 | 1 | 2.26 | 5.9 | 2 | 243 | 3.15E−03 |
| RS1351650 | 1.25 | 2/4 | 97 | 1.38 | 4/4 | 80 | 1.24 | 5.9 | 2 | 237 | 3.16E−03 |
| RS10489249 | 1.3 | 2/3 | 62 | 1.24 | 3/3 | 5 | 1.71 | 5.89 | 2 | 246 | 3.17E−03 |
| RS10518089 | 1.25 | 2/3 | 95 | 1.32 | 3/3 | 18 | 1.5 | 5.89 | 2 | 246 | 3.17E−03 |
| RS4816018 | 1.26 | 1/2 | 93 | 1.31 | 2/2 | 9 | 1.6 | 5.89 | 2 | 246 | 3.17E−03 |
| RS950085 | 1.47 | 1/4 | 95 | 1.27 | 4/4 | 56 | 1.24 | 5.94 | 2 | 172 | 3.20E−03 |
| RS1823913 | 1.3 | 2/4 | 81 | 1.25 | 4/4 | 19 | 1.51 | 5.88 | 2 | 244 | 3.21E−03 |
| RS2383024 | 1.24 | 1/2 | 104 | 1.38 | 2/2 | 35 | 1.25 | 5.88 | 2 | 241 | 3.21E−03 |
| RS9306295 | 1.3 | 1/4 | 29 | 1.16 | 4/4 | 6 | 1.58 | 5.88 | 2 | 238 | 3.22E−03 |
| RS10508842 | 1.15 | 2/3 | 55 | 1.41 | 3/3 | 185 | 1.27 | 5.87 | 2 | 244 | 3.24E−03 |
| RS725500 | 1.08 | 2/3 | 86 | 1.24 | 3/3 | 149 | 1.33 | 5.87 | 2 | 242 | 3.24E−03 |
| RS9326506 | 1.24 | 3/4 | 110 | 1.37 | 4/4 | 36 | 1.23 | 5.87 | 2 | 233 | 3.26E−03 |
| RS9312592 | 1.52 | 2/4 | 46 | 1.4 | 4/4 | 181 | 1.26 | 5.87 | 2 | 231 | 3.26E−03 |
| RS10512935 | 1.27 | 2/4 | 69 | 1.3 | 4/4 | 20 | 1.51 | 5.86 | 2 | 242 | 3.27E−03 |
| RS722569 | 1.17 | 1/3 | 117 | 1.3 | 3/3 | 86 | 1.36 | 5.86 | 2 | 242 | 3.27E−03 |
| RS1503453 | 1.31 | 3/4 | 62 | 1.24 | 4/4 | 6 | 1.67 | 5.86 | 2 | 238 | 3.28E−03 |
| RS719484 | 1.26 | 1/2 | 64 | 1.4 | 2/2 | 5 | 1.5 | 5.86 | 2 | 238 | 3.28E−03 |
| RS2477035 | 1.16 | 1/3 | 111 | 1.31 | 3/3 | 88 | 1.35 | 5.86 | 2 | 237 | 3.28E−03 |
| RS10495033 | 1.94 | 2/4 | 65 | 1.34 | 4/4 | 182 | 1.28 | 5.85 | 2 | 246 | 3.30E−03 |
| RS718993 | 1.49 | 1/3 | 72 | 1.21 | 3/3 | 163 | 1.32 | 5.85 | 2 | 243 | 3.30E−03 |
| RS1607664 | 1.46 | 2/4 | 72 | 1.38 | 4/4 | 162 | 1.25 | 5.85 | 2 | 240 | 3.31E−03 |
| RS1073913 | 1.33 | 3/4 | 116 | 1.34 | 4/4 | 57 | 1.18 | 5.85 | 2 | 236 | 3.31E−03 |
| RS10510104 | 1.72 | 2/4 | 81 | 1.32 | 4/4 | 164 | 1.27 | 5.84 | 2 | 247 | 3.33E−03 |
| RS1927404 | 1.23 | 1/3 | 88 | 1.38 | 3/3 | 43 | 1.28 | 5.85 | 2 | 223 | 3.34E−03 |
| RS196584 | 1.28 | 2/4 | 26 | 1.4 | 4/4 | 1 | 2.15 | 5.84 | 2 | 232 | 3.35E−03 |
| RS9298895 | 1.44 | 3/3 | 215 | 1.27 | 0/0 | 0 | 0 | 8.77 | 1 | 247 | 3.36E−03 |
| RS2991463 | 1.33 | 2/4 | 98 | 1.36 | 4/4 | 132 | 1.24 | 5.83 | 2 | 245 | 3.36E−03 |
| RS10501159 | 2.26 | 1/4 | 21 | 1.36 | 4/4 | 233 | 1.29 | 5.83 | 2 | 242 | 3.37E−03 |
| RS1541503 | 1.27 | 2/4 | 38 | 1.41 | 4/4 | 2 | 1.73 | 5.83 | 2 | 238 | 3.37E−03 |
| RS4757441 | 1.33 | 2/4 | 54 | 1.18 | 4/4 | 3 | 1.25 | 5.82 | 2 | 247 | 3.39E−03 |
| RS9302933 | 1.26 | 2/4 | 69 | 1.4 | 4/4 | 3 | 1.18 | 5.82 | 2 | 246 | 3.39E−03 |
| RS309275 | 1.26 | 3/4 | 109 | 1.37 | 4/4 | 106 | 1.23 | 5.82 | 2 | 244 | 3.40E−03 |
| RS10491279 | 1.78 | 1/3 | 70 | 1.23 | 3/3 | 174 | 1.31 | 5.82 | 2 | 244 | 3.40E−03 |
| RS10509153 | 1.75 | 2/4 | 37 | 1.4 | 4/4 | 189 | 1.27 | 5.83 | 2 | 225 | 3.40E−03 |
| RS10485864 | 1.27 | 2/3 | 52 | 1.34 | 3/3 | 4 | 1.75 | 5.82 | 2 | 240 | 3.40E−03 |
| RS10510156 | 1.26 | 1/4 | 50 | 1.42 | 4/4 | 180 | 1.26 | 5.82 | 2 | 232 | 3.42E−03 |
| RS10520762 | 1.3 | 2/4 | 62 | 1.35 | 4/4 | 13 | 1.04 | 5.81 | 2 | 241 | 3.43E−03 |
| RS7530592 | 1.24 | 3/4 | 120 | 1.36 | 4/4 | 27 | 1.21 | 5.81 | 2 | 240 | 3.44E−03 |
| RS1867584 | 1.21 | 2/4 | 104 | 1.33 | 4/4 | 46 | 1.38 | 5.82 | 2 | 222 | 3.44E−03 |
| RS10509772 | 1.2 | 2/4 | 112 | 1.36 | 4/4 | 68 | 1.28 | 5.81 | 2 | 235 | 3.44E−03 |
| RS6911443 | 1.28 | 1/3 | 107 | 1.27 | 3/3 | 29 | 1.48 | 5.81 | 2 | 231 | 3.45E−03 |
| RS9297984 | 1.75 | 3/4 | 90 | 1.29 | 4/4 | 139 | 1.29 | 5.81 | 2 | 231 | 3.45E−03 |
| RS10493822 | 1.72 | 2/4 | 57 | 1.25 | 4/4 | 188 | 1.3 | 5.79 | 2 | 247 | 3.49E−03 |
| RS165044 | 1.26 | 1/3 | 121 | 1.29 | 3/3 | 25 | 1.49 | 5.79 | 2 | 244 | 3.49E−03 |
| RS1928274 | 1.6 | 1/3 | 66 | 1.27 | 3/3 | 169 | 1.29 | 5.79 | 2 | 243 | 3.50E−03 |
| RS10508554 | 1.27 | 2/4 | 117 | 1.24 | 4/4 | 101 | 1.37 | 5.79 | 2 | 242 | 3.50E−03 |
| RS958938 | 1.96 | 1/3 | 32 | 1.35 | 3/3 | 215 | 1.28 | 5.78 | 2 | 246 | 3.52E−03 |
| RS2964299 | 1.31 | 2/4 | 20 | 1.11 | 0/0 | 0 | 0 | 8.68 | 1 | 247 | 3.52E−03 |
| RS1861373 | 1.23 | 1/2 | 120 | 1.26 | 2/2 | 81 | 1.39 | 5.78 | 2 | 244 | 3.53E−03 |
| RS1395817 | 1.47 | 3/3 | 170 | 1.28 | 0/0 | 0 | 0 | 8.71 | 1 | 195 | 3.55E−03 |
| RS497197 | 2.02 | 2/4 | 29 | 1.32 | 4/4 | 203 | 1.29 | 5.78 | 2 | 231 | 3.55E−03 |
| RS10498212 | 1.31 | 1/4 | 18 | 1.1 | 0/0 | 0 | 0 | 8.66 | 1 | 248 | 3.56E−03 |
| RS823986 | 1.32 | 1/3 | 133 | 1.24 | 3/3 | 81 | 1.38 | 5.77 | 2 | 233 | 3.58E−03 |
| RS1544589 | 1.37 | 1/3 | 116 | 1.32 | 3/3 | 79 | 1.21 | 5.76 | 2 | 247 | 3.59E−03 |
| RS7004663 | 1.32 | 1/4 | 47 | 1.21 | 4/4 | 3 | 1.72 | 5.78 | 2 | 213 | 3.59E−03 |
| RS4774367 | 1.28 | 2/3 | 103 | 1.35 | 3/3 | 16 | 1.08 | 5.75 | 2 | 247 | 3.62E−03 |
| RS6863889 | 1.31 | 1/3 | 25 | 1.13 | 0/0 | 0 | 0 | 8.62 | 1 | 248 | 3.64E−03 |
| RS868271 | 1.31 | 2/4 | 93 | 1.36 | 4/4 | 80 | 1.21 | 5.76 | 2 | 213 | 3.66E−03 |
| RS1525489 | 2.05 | 2/4 | 29 | 1.18 | 4/4 | 218 | 1.31 | 5.74 | 2 | 245 | 3.66E−03 |
| RS548987 | 1.28 | 2/3 | 34 | 1.36 | 3/3 | 1 | 2.2 | 5.74 | 2 | 244 | 3.66E−03 |
| RS10501933 | 1.58 | 2/4 | 73 | 1.34 | 4/4 | 165 | 1.26 | 5.74 | 2 | 244 | 3.66E−03 |
| RS1477523 | 1.32 | 2/4 | 28 | 1.14 | 0/0 | 0 | 0 | 8.6 | 1 | 248 | 3.68E−03 |
| RS2163120 | 1.54 | 4/4 | 238 | 1.28 | 0/0 | 0 | 0 | 8.6 | 1 | 248 | 3.68E−03 |
| RS10506524 | 1.5 | 3/3 | 231 | 1.28 | 0/0 | 0 | 0 | 8.6 | 1 | 247 | 3.68E−03 |
| RS4131874 | 1.35 | 2/3 | 92 | 1.22 | 3/3 | 16 | 1.23 | 5.73 | 2 | 241 | 3.71E−03 |
| RS2981069 | 1.26 | 2/4 | 57 | 1.41 | 4/4 | 3 | 1.26 | 5.73 | 2 | 241 | 3.71E−03 |
| RS1460597 | 1.52 | 2/3 | 109 | 1.25 | 3/3 | 119 | 1.32 | 5.73 | 2 | 239 | 3.71E−03 |
| RS10511729 | 1.28 | 1/2 | 121 | 1.26 | 2/2 | 38 | 1.45 | 5.72 | 2 | 246 | 3.73E−03 |
| RS1983726 | 1.56 | 2/4 | 101 | 1.26 | 4/4 | 135 | 1.29 | 5.72 | 2 | 245 | 3.73E−03 |
| RS10511482 | 2.26 | 2/4 | 59 | 1.33 | 4/4 | 186 | 1.28 | 5.72 | 2 | 243 | 3.74E−03 |
| RS2711452 | 1.26 | 1/3 | 83 | 1.38 | 3/3 | 25 | 1.21 | 5.73 | 2 | 225 | 3.74E−03 |
| RS10497723 | 1.32 | 1/3 | 32 | 1.15 | 0/0 | 0 | 0 | 8.56 | 1 | 246 | 3.76E−03 |
| RS10500130 | 1.27 | 3/4 | 41 | 1.3 | 4/4 | 4 | 1.75 | 5.72 | 2 | 231 | 3.76E−03 |
| RS1841914 | 1.27 | 1/3 | 131 | 1.25 | 3/3 | 72 | 1.4 | 5.71 | 2 | 247 | 3.77E−03 |
| RS1938105 | 1.26 | 1/3 | 57 | 1.18 | 3/3 | 185 | 1.34 | 5.71 | 2 | 245 | 3.77E−03 |
| RS1341001 | 1.5 | 1/3 | 123 | 1.25 | 3/3 | 106 | 1.31 | 5.71 | 2 | 244 | 3.77E−03 |
| RS10488204 | 1.28 | 2/3 | 18 | 1.5 | 0/0 | 0 | 0 | 8.55 | 1 | 246 | 3.78E−03 |
| RS7670292 | 1.33 | 2/4 | 75 | 1.21 | 4/4 | 6 | 1.53 | 5.71 | 2 | 237 | 3.79E−03 |
| RS7844425 | 1.24 | 1/2 | 119 | 1.32 | 2/2 | 18 | 1.48 | 5.71 | 2 | 235 | 3.79E−03 |
| RS10510344 | 1.16 | 3/3 | 208 | 1.32 | 0/0 | 0 | 0 | 8.54 | 1 | 240 | 3.81E−03 |
| RS10516032 | 1.87 | 2/4 | 42 | 1.27 | 4/4 | 201 | 1.29 | 5.7 | 2 | 243 | 3.81E−03 |
| RS6852312 | 1.28 | 3/4 | 25 | 1.46 | 0/0 | 0 | 0 | 8.53 | 1 | 248 | 3.82E−03 |
| RS9317744 | 1.56 | 4/4 | 220 | 1.29 | 0/0 | 0 | 0 | 8.54 | 1 | 229 | 3.82E−03 |
| RS4368350 | 1.75 | 2/4 | 36 | 1.21 | 4/4 | 180 | 1.31 | 5.71 | 2 | 217 | 3.83E−03 |
| RS7577293 | 1.19 | 1/3 | 101 | 1.37 | 3/3 | 135 | 1.25 | 5.69 | 2 | 246 | 3.84E−03 |
| RS10514263 | 1.28 | 1/2 | 16 | 1.54 | 2/2 | 1 | 1.16 | 5.69 | 2 | 243 | 3.85E−03 |
| RS10514632 | 1.03 | 1/3 | 83 | 1.23 | 3/3 | 154 | 1.34 | 5.69 | 2 | 240 | 3.85E−03 |
| RS1376499 | 1.27 | 3/4 | 112 | 1.25 | 4/4 | 43 | 1.42 | 5.7 | 2 | 222 | 3.85E−03 |
| RS7148756 | 1.48 | 1/4 | 55 | 1.19 | 4/4 | 150 | 1.34 | 5.71 | 2 | 206 | 3.86E−03 |
| RS2165347 | 1.26 | 2/4 | 111 | 1.35 | 4/4 | 85 | 1.22 | 5.7 | 2 | 217 | 3.87E−03 |
| RS1199292 | 1.46 | 2/4 | 111 | 1.27 | 4/4 | 89 | 1.28 | 5.69 | 2 | 230 | 3.87E−03 |
| RS1441541 | 1.51 | 1/3 | 43 | 1.17 | 3/3 | 201 | 1.32 | 5.68 | 2 | 246 | 3.88E−03 |
| RS171785 | 1.4 | 1/3 | 114 | 1.33 | 3/3 | 104 | 1.22 | 5.68 | 2 | 245 | 3.88E−03 |
| RS10484331 | 1.38 | 2/4 | 122 | 1.24 | 4/4 | 39 | 1.31 | 5.68 | 2 | 245 | 3.88E−03 |
| RS2572276 | 1.48 | 1/3 | 96 | 1.25 | 3/3 | 129 | 1.3 | 5.68 | 2 | 245 | 3.88E−03 |
| RS10483323 | 1.15 | 1/3 | 74 | 1.39 | 3/3 | 162 | 1.27 | 5.68 | 2 | 244 | 3.88E−03 |
| RS3859362 | 1.52 | 2/4 | 95 | 1.24 | 4/4 | 119 | 1.32 | 5.69 | 2 | 225 | 3.88E−03 |
| RS10513765 | 1.27 | 2/4 | 115 | 1.36 | 4/4 | 95 | 1.23 | 5.68 | 2 | 239 | 3.89E−03 |
| RS964059 | 1.25 | 3/4 | 74 | 1.39 | 4/4 | 9 | 1.24 | 5.68 | 2 | 239 | 3.89E−03 |
| RS2825583 | 1.22 | 2/4 | 107 | 1.37 | 4/4 | 53 | 1.28 | 5.67 | 2 | 242 | 3.92E−03 |
| RS8137239 | 1.19 | 1/3 | 19 | 1.52 | 3/3 | 221 | 1.28 | 5.67 | 2 | 238 | 3.93E−03 |
| RS6699989 | 1.55 | 1/3 | 62 | 1.36 | 3/3 | 175 | 1.26 | 5.66 | 2 | 243 | 3.96E−03 |
| RS2396821 | 1.25 | 1/3 | 69 | 1.4 | 3/3 | 10 | 1.33 | 5.66 | 2 | 242 | 3.96E−03 |
| RS10507930 | 1.65 | 3/3 | 244 | 1.29 | 0/0 | 0 | 0 | 8.46 | 1 | 248 | 3.96E−03 |
| RS7324065 | 1.53 | 3/3 | 234 | 1.28 | 0/0 | 0 | 0 | 8.45 | 1 | 245 | 3.98E−03 |
| RS1329983 | 0.93 | 1/3 | 52 | 1.39 | 3/3 | 193 | 1.27 | 5.65 | 2 | 245 | 3.99E−03 |
| RS7874576 | 1.68 | 3/3 | 241 | 1.29 | 0/0 | 0 | 0 | 8.44 | 1 | 244 | 4.01E−03 |
| RS10513275 | 1.29 | 2/4 | 50 | 1.28 | 4/4 | 7 | 1.67 | 5.64 | 2 | 246 | 4.03E−03 |
| RS1324088 | 1.28 | 2/4 | 36 | 1.35 | 4/4 | 1 | 2.2 | 5.64 | 2 | 246 | 4.03E−03 |
| RS10495466 | 1.28 | 2/4 | 20 | 1.51 | 4/4 | 1 | 1.39 | 5.64 | 2 | 245 | 4.03E−03 |
| RS718911 | 1.3 | 1/3 | 51 | 1.27 | 3/3 | 2 | 2 | 5.64 | 2 | 244 | 4.03E−03 |
| RS4952676 | 1.22 | 1/3 | 107 | 1.35 | 3/3 | 39 | 1.3 | 5.64 | 2 | 243 | 4.03E−03 |
| RS10518774 | 1.41 | 1/3 | 127 | 1.27 | 3/3 | 55 | 1.25 | 5.64 | 2 | 240 | 4.04E−03 |
| RS488673 | 1.31 | 2/4 | 87 | 1.22 | 4/4 | 32 | 1.43 | 5.66 | 2 | 204 | 4.05E−03 |
| RS3815035 | 1.39 | 2/4 | 48 | 1.42 | 4/4 | 195 | 1.26 | 5.63 | 2 | 245 | 4.07E−03 |
| RS3890717 | 1.4 | 3/4 | 124 | 1.32 | 4/4 | 76 | 1.21 | 5.63 | 2 | 242 | 4.07E−03 |
| RS188014 | 1.51 | 3/3 | 229 | 1.28 | 0/0 | 0 | 0 | 8.41 | 1 | 242 | 4.07E−03 |
| RS10508318 | 1.38 | 1/2 | 81 | 1.2 | 2/2 | 146 | 1.34 | 5.63 | 2 | 232 | 4.10E−03 |
| RS472154 | 1.29 | 2/3 | 78 | 1.2 | 3/3 | 150 | 1.34 | 5.62 | 2 | 244 | 4.11E−03 |
| RS9300024 | 1.24 | 1/3 | 113 | 1.37 | 3/3 | 69 | 1.24 | 5.62 | 2 | 244 | 4.11E−03 |
| RS10512405 | 1.45 | 2/4 | 54 | 1.39 | 4/4 | 127 | 1.26 | 5.65 | 2 | 197 | 4.11E−03 |
| RS7009058 | 1.31 | 3/4 | 56 | 1.2 | 4/4 | 9 | 1.5 | 5.62 | 2 | 243 | 4.11E−03 |
| RS341148 | 1.35 | 2/4 | 49 | 1.24 | 4/4 | 28 | 1.16 | 5.67 | 2 | 175 | 4.11E−03 |
| RS9302288 | 1.34 | 1/3 | 83 | 1.21 | 3/3 | 7 | 1.43 | 5.62 | 2 | 242 | 4.11E−03 |
| Rs10498604 | 1.27 | 2/4 | 80 | 1.21 | 4/4 | 153 | 1.35 | 5.61 | 2 | 247 | 4.14E−03 |
| RS6812018 | 1.28 | 3/4 | 44 | 1.34 | 4/4 | 5 | 1.72 | 5.61 | 2 | 243 | 4.15E−03 |
| RS10514569 | 1.07 | 4/4 | 180 | 1.31 | 0/0 | 0 | 0 | 8.41 | 1 | 191 | 4.17E−03 |
| RS3751462 | 1.34 | 1/4 | 46 | 1.18 | 4/4 | 10 | 1.23 | 5.63 | 2 | 203 | 4.17E−03 |
| RS987479 | 1.28 | 1/3 | 78 | 1.29 | 3/3 | 14 | 1.54 | 5.6 | 2 | 238 | 4.20E−03 |
| RS1233853 | 2 | 1/3 | 26 | 1.31 | 3/3 | 207 | 1.29 | 5.6 | 2 | 232 | 4.22E−03 |
| RS979323 | 1.43 | 1/2 | 104 | 1.31 | 2/2 | 85 | 1.23 | 5.6 | 2 | 226 | 4.23E−03 |
| RS962592 | 1.29 | 2/4 | 6 | 1.65 | 0/0 | 0 | 0 | 8.33 | 1 | 247 | 4.24E−03 |
| RS5962018 | 1.28 | 4/4 | 35 | 1.44 | 0/0 | 0 | 0 | 8.33 | 1 | 243 | 4.25E−03 |
| RS362988 | 1.36 | 1/3 | 87 | 1.3 | 3/3 | 54 | 1.19 | 5.6 | 2 | 215 | 4.26E−03 |
| RS945849 | 1.3 | 1/3 | 80 | 1.28 | 3/3 | 3 | 1.86 | 5.58 | 2 | 246 | 4.27E−03 |
| RS7078806 | 1.29 | 1/3 | 21 | 1.35 | 3/3 | 1 | 2.26 | 5.58 | 2 | 243 | 4.27E−03 |
| RS8089476 | 1.29 | 2/4 | 115 | 1.24 | 4/4 | 95 | 1.37 | 5.58 | 2 | 242 | 4.27E−03 |
| RS9293488 | 1.28 | 2/4 | 13 | 1.51 | 0/0 | 0 | 0 | 8.32 | 1 | 229 | 4.30E−03 |
| RS1340169 | 1.58 | 4/4 | 239 | 1.29 | 0/0 | 0 | 0 | 8.3 | 1 | 246 | 4.31E−03 |
| RS6109935 | 1.52 | 2/4 | 84 | 1.29 | 4/4 | 123 | 1.27 | 5.58 | 2 | 223 | 4.32E−03 |
| RS10502776 | 1.31 | 1/3 | 13 | 1.06 | 0/0 | 0 | 0 | 8.29 | 1 | 248 | 4.33E−03 |
| RS1403635 | 1.64 | 2/4 | 74 | 1.27 | 4/4 | 168 | 1.29 | 5.56 | 2 | 247 | 4.35E−03 |
| RS3800274 | 1.56 | 3/4 | 85 | 1.3 | 4/4 | 133 | 1.27 | 5.57 | 2 | 228 | 4.35E−03 |
| RS1459914 | 1.3 | 3/4 | 44 | 1.24 | 4/4 | 1 | 2.2 | 5.56 | 2 | 245 | 4.35E−03 |
| RS1233775 | 1.34 | 2/4 | 105 | 1.24 | 4/4 | 6 | 1.05 | 5.56 | 2 | 245 | 4.35E−03 |
| RS9294240 | 1.2 | 1/3 | 81 | 1.38 | 3/3 | 143 | 1.26 | 5.56 | 2 | 240 | 4.36E−03 |
| RS1407390 | 1.29 | 2/4 | 76 | 1.28 | 4/4 | 3 | 1.86 | 5.55 | 2 | 246 | 4.39E−03 |
| RS10495804 | 1.43 | 2/4 | 105 | 1.24 | 4/4 | 117 | 1.33 | 5.55 | 2 | 245 | 4.39E−03 |
| RS6477845 | 1.86 | 1/3 | 75 | 1.28 | 3/3 | 170 | 1.29 | 5.55 | 2 | 245 | 4.39E−03 |
| RS10501158 | 1.28 | 1/3 | 30 | 1.32 | 3/3 | 1 | 2.26 | 5.55 | 2 | 245 | 4.39E−03 |
| RS1945654 | 1.3 | 2/3 | 58 | 1.27 | 3/3 | 3 | 1.86 | 5.55 | 2 | 244 | 4.39E−03 |
| RS3814860 | 1.26 | 3/4 | 75 | 1.4 | 4/4 | 11 | 1.22 | 5.55 | 2 | 243 | 4.40E−03 |
| RS2881836 | 1.22 | 3/4 | 106 | 1.35 | 4/4 | 21 | 1.38 | 5.55 | 2 | 234 | 4.42E−03 |
| RS1805781 | 1.6 | 3/3 | 238 | 1.29 | 0/0 | 0 | 0 | 8.25 | 1 | 244 | 4.43E−03 |
| RS294665 | 1.26 | 2/4 | 78 | 1.38 | 4/4 | 8 | 1.17 | 5.54 | 2 | 242 | 4.44E−03 |
| RS3897748 | 1.33 | 2/3 | 67 | 1.2 | 3/3 | 6 | 1.19 | 5.54 | 2 | 240 | 4.45E−03 |
| RS10517222 | 1.25 | 1/3 | 81 | 1.32 | 3/3 | 15 | 1.5 | 5.53 | 2 | 244 | 4.48E−03 |
| RS10507083 | 1.08 | 1/3 | 82 | 1.27 | 3/3 | 145 | 1.33 | 5.53 | 2 | 240 | 4.49E−03 |
| RS796892 | 1.29 | 2/4 | 108 | 1.37 | 4/4 | 122 | 1.24 | 5.52 | 2 | 246 | 4.52E−03 |
| RS7002137 | 1.26 | 2/3 | 65 | 1.38 | 3/3 | 4 | 1.59 | 5.52 | 2 | 246 | 4.52E−03 |
| RS7719212 | 1.29 | 2/3 | 16 | 1.4 | 3/3 | 1 | 2.2 | 5.52 | 2 | 245 | 4.52E−03 |
| RS713265 | 2.26 | 2/4 | 19 | 1.34 | 4/4 | 224 | 1.29 | 5.52 | 2 | 241 | 4.53E−03 |
| RS6848015 | 1.3 | 2/3 | 64 | 1.24 | 3/3 | 4 | 1.74 | 5.52 | 2 | 241 | 4.53E−03 |
| RS10495202 | 1.25 | 1/3 | 90 | 1.36 | 3/3 | 14 | 1.44 | 5.51 | 2 | 247 | 4.56E−03 |
| RS4129693 | 1.29 | 2/4 | 90 | 1.27 | 4/4 | 11 | 1.59 | 5.51 | 2 | 246 | 4.56E−03 |
| RS4073474 | 1.34 | 1/3 | 109 | 1.23 | 3/3 | 37 | 1.37 | 5.51 | 2 | 246 | 4.56E−03 |
| RS150344 | 1.27 | 3/4 | 62 | 1.34 | 4/4 | 7 | 1.61 | 5.51 | 2 | 242 | 4.57E−03 |
| RS1915552 | 1.33 | 1/4 | 133 | 1.34 | 4/4 | 75 | 1.2 | 5.51 | 2 | 239 | 4.58E−03 |
| RS1440063 | 1.37 | 1/3 | 98 | 1.23 | 3/3 | 39 | 1.25 | 5.52 | 2 | 219 | 4.58E−03 |
| RS494739 | 1.27 | 2/4 | 36 | 1.45 | 4/4 | 3 | 1.19 | 5.5 | 2 | 245 | 4.61E−03 |
| RS2391476 | 1.18 | 3/4 | 43 | 1.43 | 4/4 | 198 | 1.27 | 5.5 | 2 | 242 | 4.61E−03 |
| RS2054915 | 1.26 | 1/2 | 128 | 1.35 | 2/2 | 46 | 1.19 | 5.5 | 2 | 237 | 4.63E−03 |
| RS989766 | 1.27 | 2/3 | 62 | 1.28 | 3/3 | 27 | 1.48 | 5.51 | 2 | 215 | 4.64E−03 |
| RS7675645 | 1.26 | 1/3 | 76 | 1.35 | 3/3 | 5 | 1.63 | 5.49 | 2 | 245 | 4.65E−03 |
| RS1571502 | 1.03 | 2/4 | 46 | 1.43 | 4/4 | 199 | 1.27 | 5.49 | 2 | 243 | 4.66E−03 |
| RS1661405 | 1.56 | 3/3 | 240 | 1.29 | 0/0 | 0 | 0 | 8.15 | 1 | 248 | 4.67E−03 |
| RS2675200 | 1.16 | 4/4 | 218 | 1.32 | 0/0 | 0 | 0 | 8.14 | 1 | 248 | 4.70E−03 |
| RS3905336 | 1.61 | 4/4 | 242 | 1.28 | 0/0 | 0 | 0 | 8.14 | 1 | 247 | 4.70E−03 |
| RS652238 | 1.33 | 2/4 | 55 | 1.19 | 4/4 | 11 | 1.22 | 5.48 | 2 | 244 | 4.70E−03 |
| RS3852745 | 1.02 | 1/2 | 106 | 1.3 | 2/2 | 127 | 1.32 | 5.48 | 2 | 242 | 4.70E−03 |
| RS10491948 | 1.28 | 2/3 | 11 | 1.55 | 0/0 | 0 | 0 | 8.14 | 1 | 237 | 4.71E−03 |
| RS10490414 | 1.59 | 4/4 | 239 | 1.29 | 0/0 | 0 | 0 | 8.13 | 1 | 245 | 4.73E−03 |
| RS3751337 | 1.11 | 1/3 | 107 | 1.34 | 3/3 | 121 | 1.29 | 5.47 | 2 | 246 | 4.74E−03 |
| RS1041802 | 1.26 | 3/4 | 102 | 1.37 | 4/4 | 21 | 1.19 | 5.47 | 2 | 244 | 4.74E−03 |
| RS10505725 | 1.32 | 2/4 | 90 | 1.23 | 4/4 | 20 | 1.46 | 5.47 | 2 | 238 | 4.76E−03 |
| RS1207613 | 1.27 | 3/3 | 44 | 1.41 | 0/0 | 0 | 0 | 8.12 | 1 | 236 | 4.76E−03 |
| RS4981115 | 1.77 | 1/3 | 31 | 1.33 | 3/3 | 199 | 1.28 | 5.47 | 2 | 231 | 4.77E−03 |
| RS1150030 | 1.19 | 1/3 | 29 | 1.47 | 3/3 | 219 | 1.27 | 5.46 | 2 | 246 | 4.78E−03 |
| RS2217610 | 1.25 | 1/3 | 77 | 1.39 | 3/3 | 11 | 1.27 | 5.47 | 2 | 227 | 4.78E−03 |
| RS596255 | 1.44 | 2/3 | 97 | 1.34 | 3/3 | 129 | 1.24 | 5.46 | 2 | 245 | 4.79E−03 |
| RS7906587 | 1.29 | 2/4 | 20 | 1.27 | 4/4 | 1 | 2.26 | 5.46 | 2 | 245 | 4.79E−03 |
| RS10489251 | 1.71 | 3/4 | 58 | 1.25 | 4/4 | 183 | 1.3 | 5.46 | 2 | 243 | 4.79E−03 |
| RS10509766 | 1.25 | 2/4 | 93 | 1.24 | 4/4 | 123 | 1.36 | 5.46 | 2 | 242 | 4.79E−03 |
| RS4890429 | 1.25 | 1/3 | 94 | 1.33 | 3/3 | 22 | 1.46 | 5.46 | 2 | 242 | 4.79E−03 |
| RS7694034 | 1.23 | 1/3 | 68 | 1.2 | 3/3 | 167 | 1.34 | 5.46 | 2 | 240 | 4.80E−03 |
| RS7963889 | 1.36 | 1/3 | 94 | 1.34 | 3/3 | 95 | 1.21 | 5.47 | 2 | 217 | 4.81E−03 |
| RS286300 | 1.27 | 2/4 | 30 | 1.46 | 4/4 | 1 | 1.09 | 5.45 | 2 | 246 | 4.83E−03 |
| RS10493985 | 1.61 | 3/3 | 243 | 1.29 | 0/0 | 0 | 0 | 8.08 | 1 | 248 | 4.85E−03 |
| RS6823379 | 1.28 | 1/3 | 13 | 1.53 | 0/0 | 0 | 0 | 8.08 | 1 | 248 | 4.85E−03 |
| RS499891 | 1.29 | 1/3 | 9 | 1.58 | 0/0 | 0 | 0 | 8.07 | 1 | 248 | 4.87E−03 |
| RS539085 | 1.29 | 2/3 | 9 | 1.58 | 0/0 | 0 | 0 | 8.07 | 1 | 248 | 4.87E−03 |
| RS2156348 | 1.29 | 2/4 | 9 | 1.58 | 0/0 | 0 | 0 | 8.07 | 1 | 248 | 4.87E−03 |
| RS477892 | 1.29 | 1/3 | 9 | 1.58 | 0/0 | 0 | 0 | 8.07 | 1 | 248 | 4.87E−03 |
| RS480413 | 1.58 | 3/3 | 241 | 1.29 | 0/0 | 0 | 0 | 8.07 | 1 | 248 | 4.87E−03 |
| RS2856259 | 1.58 | 3/3 | 241 | 1.29 | 0/0 | 0 | 0 | 8.07 | 1 | 248 | 4.87E−03 |
| RS4939237 | 1.58 | 3/3 | 241 | 1.29 | 0/0 | 0 | 0 | 8.07 | 1 | 248 | 4.87E−03 |
| RS10502807 | 1.28 | 2/4 | 40 | 1.32 | 4/4 | 5 | 1.7 | 5.45 | 2 | 227 | 4.88E−03 |
| RS10512282 | 1.32 | 1/2 | 38 | 1.16 | 2/2 | 3 | 1.53 | 5.44 | 2 | 243 | 4.88E−03 |
| RS10500585 | 1.36 | 2/4 | 111 | 1.24 | 4/4 | 14 | 1.21 | 5.44 | 2 | 240 | 4.89E−03 |
| RS823638 | 1.86 | 1/3 | 59 | 1.28 | 3/3 | 160 | 1.29 | 5.45 | 2 | 219 | 4.90E−03 |
| RS697902 | 1.26 | 2/4 | 82 | 1.24 | 4/4 | 32 | 1.43 | 5.46 | 2 | 202 | 4.90E−03 |
| RS10493987 | 1.67 | 3/3 | 242 | 1.29 | 0/0 | 0 | 0 | 8.06 | 1 | 245 | 4.91E−03 |
| RS4733224 | 1.22 | 1/3 | 100 | 1.3 | 3/3 | 41 | 1.4 | 5.44 | 2 | 228 | 4.92E−03 |
| RS2731239 | 1.29 | 2/4 | 116 | 1.23 | 4/4 | 112 | 1.36 | 5.43 | 2 | 247 | 4.92E−03 |
| RS7459039 | 1.29 | 1/3 | 104 | 1.23 | 3/3 | 131 | 1.35 | 5.43 | 2 | 245 | 4.93E−03 |
| RS1156968 | 1.26 | 2/4 | 51 | 1.41 | 4/4 | 3 | 1.49 | 5.43 | 2 | 245 | 4.93E−03 |
| RS7470491 | 1.3 | 2/4 | 78 | 1.28 | 4/4 | 3 | 1.86 | 5.43 | 2 | 244 | 4.93E−03 |
| RS10485148 | 1.39 | 2/4 | 98 | 1.35 | 4/4 | 121 | 1.24 | 5.43 | 2 | 242 | 4.93E−03 |
| RS564896 | 1.24 | 2/4 | 106 | 1.36 | 4/4 | 113 | 1.24 | 5.43 | 2 | 239 | 4.94E−03 |
| RS666941 | 1.21 | 1/4 | 112 | 1.27 | 4/4 | 75 | 1.38 | 5.43 | 2 | 231 | 4.96E−03 |
| RS10506603 | 1.62 | 3/3 | 237 | 1.29 | 0/0 | 0 | 0 | 8.04 | 1 | 242 | 4.96E−03 |
| RS2669892 | 1.25 | 1/3 | 73 | 1.39 | 3/3 | 9 | 1.32 | 5.42 | 2 | 244 | 4.98E−03 |
| RS6477360 | 1.35 | 1/3 | 103 | 1.22 | 3/3 | 68 | 1.34 | 5.42 | 2 | 237 | 4.99E−03 |
| RS10506602 | 1.28 | 2/3 | 7 | 1.6 | 0/0 | 0 | 0 | 8.03 | 1 | 232 | 5.01E−03 |
| RS10518821 | 1.29 | 1/3 | 82 | 1.28 | 3/3 | 6 | 1.69 | 5.41 | 2 | 246 | 5.02E−03 |
| RS10508269 | 1.19 | 1/2 | 37 | 1.44 | 2/2 | 206 | 1.27 | 5.41 | 2 | 244 | 5.02E−03 |
| RS10512501 | 2.15 | 1/3 | 28 | 1.21 | 3/3 | 218 | 1.3 | 5.41 | 2 | 244 | 5.02E−03 |
| RS757668 | 1.45 | 1/3 | 120 | 1.29 | 3/3 | 90 | 1.26 | 5.41 | 2 | 242 | 5.03E−03 |
| RS10518404 | 1.3 | 2/4 | 21 | 1.24 | 4/4 | 2 | 1.97 | 5.41 | 2 | 236 | 5.04E−03 |
| RS1813404 | 1.23 | 2/4 | 101 | 1.33 | 4/4 | 23 | 1.43 | 5.41 | 2 | 235 | 5.05E−03 |
| RS10510020 | 1.29 | 1/3 | 22 | 1.33 | 3/3 | 1 | 2.26 | 5.4 | 2 | 247 | 5.07E−03 |
| RS10510022 | 1.29 | 1/3 | 22 | 1.33 | 3/3 | 1 | 2.26 | 5.4 | 2 | 247 | 5.07E−03 |
| RS10510023 | 2.26 | 1/3 | 22 | 1.33 | 3/3 | 227 | 1.29 | 5.4 | 2 | 247 | 5.07E−03 |
| RS723855 | 1.53 | 1/3 | 98 | 1.31 | 3/3 | 118 | 1.25 | 5.41 | 2 | 225 | 5.07E−03 |
| RS10491340 | 1.6 | 2/4 | 31 | 1.2 | 4/4 | 202 | 1.3 | 5.4 | 2 | 237 | 5.09E−03 |
| RS713266 | 1.29 | 2/4 | 31 | 1.32 | 4/4 | 1 | 2.26 | 5.39 | 2 | 246 | 5.12E−03 |
| RS2011688 | 1.29 | 2/4 | 37 | 1.28 | 4/4 | 1 | 2.26 | 5.39 | 2 | 246 | 5.12E−03 |
| RS2826847 | 1.29 | 2/4 | 50 | 1.32 | 4/4 | 1 | 2.26 | 5.39 | 2 | 243 | 5.12E−03 |
| RS869206 | 1.29 | 2/4 | 19 | 1.32 | 4/4 | 1 | 2.26 | 5.39 | 2 | 235 | 5.14E−03 |
| RS1355296 | 1.85 | 1/3 | 41 | 1.32 | 3/3 | 193 | 1.29 | 5.39 | 2 | 234 | 5.15E−03 |
| RS9298249 | 2.26 | 1/3 | 13 | 1.25 | 3/3 | 236 | 1.3 | 5.38 | 2 | 247 | 5.16E−03 |
| RS580758 | 1.75 | 1/2 | 42 | 1.34 | 2/2 | 203 | 1.28 | 5.38 | 2 | 246 | 5.17E−03 |
| RS10517618 | 1.24 | 3/4 | 83 | 1.31 | 4/4 | 24 | 1.45 | 5.39 | 2 | 226 | 5.17E−03 |
| RS979322 | 1.24 | 2/4 | 124 | 1.29 | 4/4 | 41 | 1.42 | 5.38 | 2 | 244 | 5.17E−03 |
| RS9298675 | 2.15 | 2/4 | 35 | 1.21 | 4/4 | 208 | 1.3 | 5.38 | 2 | 241 | 5.18E−03 |
| RS2863171 | 1.57 | 3/4 | 41 | 1.41 | 4/4 | 172 | 1.27 | 5.39 | 2 | 215 | 5.20E−03 |
| RS1459506 | 1.22 | 1/3 | 104 | 1.37 | 3/3 | 83 | 1.25 | 5.39 | 2 | 213 | 5.21E−03 |
| RS1822539 | 1.26 | 2/4 | 47 | 1.42 | 4/4 | 7 | 1.22 | 5.38 | 2 | 228 | 5.21E−03 |
| RS10488521 | 1.65 | 2/4 | 58 | 1.25 | 4/4 | 185 | 1.3 | 5.37 | 2 | 247 | 5.21E−03 |
| RS10504894 | 1.49 | 1/3 | 107 | 1.27 | 3/3 | 110 | 1.29 | 5.37 | 2 | 238 | 5.24E−03 |
| RS2255751 | 1.16 | 2/4 | 121 | 1.32 | 4/4 | 64 | 1.33 | 5.37 | 2 | 227 | 5.26E−03 |
| RS7827548 | 1.23 | 2/3 | 109 | 1.35 | 3/3 | 29 | 1.36 | 5.36 | 2 | 246 | 5.27E−03 |
| RS1451336 | 1.29 | 1/3 | 131 | 1.26 | 3/3 | 43 | 1.43 | 5.36 | 2 | 245 | 5.27E−03 |
| RS10493355 | 0.97 | 1/3 | 37 | 1.44 | 3/3 | 210 | 1.27 | 5.35 | 2 | 245 | 5.32E−03 |
| RS1926029 | 1.36 | 2/4 | 56 | 1.21 | 4/4 | 12 | 1.22 | 5.38 | 2 | 194 | 5.32E−03 |
| RS2572269 | 1.47 | 1/3 | 90 | 1.24 | 3/3 | 135 | 1.3 | 5.35 | 2 | 244 | 5.32E−03 |
| RS10507118 | 1.64 | 2/3 | 42 | 1.19 | 3/3 | 140 | 1.32 | 5.38 | 2 | 183 | 5.37E−03 |

[0176] TABLE 4
The most significant haplotype regions for HDL based
on HaploRec + HPM analysis.

| RS_id | SEQ_ID_no | Gene | Gene_id | Chr | Position | P-value |
|---|---|---|---|---|---|---|
| RS10518315 | 24 | | | 1 | 69591823 | 9.00E−05 |
| RS2181719 | 36 | | | 1 | 80970894 | 9.00E−05 |
| RS10516673 | 370 | HNRPD | 3184 | 4 | 83635972 | 9.00E−05 |
| RS2069080 | 371 | LOC391672 | 391672 | 4 | 83679770 | 9.00E−05 |
| RS2029259 | 484 | | | 4 | 188422292 | 9.00E−05 |
| RS2195989 | 872 | ANGPT1 | 284 | 8 | 108555088 | 9.00E−05 |
| RS10493677 | 33 | | | 1 | 80890427 | 1.00E−04 |
| RS1577879 | 34 | | | 1 | 80924966 | 1.00E−04 |
| RS10489696 | 35 | | | 1 | 80942453 | 1.00E−04 |
| RS1352276 | 483 | | | 4 | 188415169 | 1.00E−04 |
| RS963204 | 859 | CNGB3 | 54714 | 8 | 87658121 | 1.00E−04 |
| RS9297941 | 860 | CNGB3 | 54714 | 8 | 87727855 | 1.00E−04 |
| RS2147085 | 37 | | | 1 | 80971158 | 2.00E−04 |
| RS2288338 | 369 | HNRPD | 3184 | 4 | 83631813 | 2.00E−04 |
| RS9296540 | 638 | | | 6 | 47418964 | 2.00E−04 |
| RS9296545 | 639 | | | 6 | 47433570 | 2.00E−04 |
| RS10504709 | 848 | | | 8 | 80781919 | 2.00E−04 |
| RS6992703 | 850 | | | 8 | 80831834 | 2.00E−04 |
| RS10507326 | 1171 | | | 13 | 22616744 | 2.00E−04 |
| RS1998846 | 25 | | | 1 | 69613578 | 3.00E−04 |
| RS841665 | 32 | | | 1 | 80889752 | 3.00E−04 |
| RS4847303 | 56 | ABCD3 | 5825 | 1 | 94602933 | 3.00E−04 |
| RS3770874 | 165 | CRIM1 | 51232 | 2 | 36595648 | 3.00E−04 |
| RS7695741 | 372 | LOC391672 | 391672 | 4 | 83680241 | 3.00E−04 |
| RS10516562 | 400 | | | 4 | 111663867 | 3.00E−04 |
| RS2979710 | 849 | | | 8 | 80814997 | 3.00E−04 |
| RS10504826 | 861 | CNGB3 | 54714 | 8 | 87759135 | 3.00E−04 |
| RS1283713 | 870 | ANGPT1 | 284 | 8 | 108535493 | 3.00E−04 |
| RS1283726 | 871 | ANGPT1 | 284 | 8 | 108545032 | 3.00E−04 |
| RS1881740 | 979 | | | 10 | 49221566 | 3.00E−04 |
| RS2590386 | 980 | | | 10 | 49255436 | 3.00E−04 |
| RS10508901 | 981 | MAPK8 | 5599 | 10 | 49297404 | 3.00E−04 |
| RS10493456 | 23 | | | 1 | 69591130 | 4.00E−04 |
| RS1749541 | 57 | ABCD3 | 5825 | 1 | 94670399 | 4.00E−04 |
| RS756203 | 166 | CRIM1 | 51232 | 2 | 36598324 | 4.00E−04 |
| RS1433171 | 873 | ANGPT1 | 284 | 8 | 108561416 | 4.00E−04 |
| RS4770403 | 1173 | SGCG | 6445 | 13 | 22653127 | 4.00E−04 |
| RS1014938 | 718 | | | 7 | 37714392 | 5.00E−04 |
| RS10503573 | 780 | MSR1 | 4481 | 8 | 16047855 | 5.00E−04 |
| RS10503586 | 803 | | | 8 | 16792998 | 5.00E−04 |
| RS974279 | 858 | CNGB3 | 54714 | 8 | 87657635 | 5.00E−04 |
| RS7850478 | 946 | | | 9 | 117366392 | 5.00E−04 |
| RS10491855 | 947 | | | 9 | 117375274 | 5.00E−04 |
| RS727081 | 1172 | | | 13 | 22630199 | 5.00E−04 |
| RS787494 | 13 | | | 1 | 67797607 | 6.00E−04 |
| RS848504 | 164 | CRIM1 | 51232 | 2 | 36567045 | 6.00E−04 |
| RS9312601 | 467 | | | 4 | 177742191 | 6.00E−04 |
| RS1383162 | 795 | | | 8 | 16181469 | 6.00E−04 |
| RS1480145 | 796 | | | 8 | 16181494 | 6.00E−04 |
| RS970633 | 862 | CNGB3 | 54714 | 8 | 87759864 | 6.00E−04 |
| RS10505108 | 874 | ANGPT1 | 284 | 8 | 108564233 | 6.00E−04 |
| RS2435307 | 1371 | NPC1 | 4864 | 18 | 19381908 | 6.00E−04 |
| RS976000 | 485 | | | 4 | 188603100 | 7.00E−04 |
| RS10520904 | 503 | | | 5 | 24966531 | 7.00E−04 |
| RS1493479 | 504 | | | 5 | 25023525 | 7.00E−04 |
| RS10498717 | 624 | | | 6 | 23833783 | 7.00E−04 |
| RS1484751 | 781 | MSR1 | 4481 | 8 | 16064328 | 7.00E−04 |
| RS10503576 | 794 | | | 8 | 16179617 | 7.00E−04 |
| RS1112268 | 978 | | | 10 | 49217160 | 7.00E−04 |
| RS2896587 | 1044 | | | 11 | 11726440 | 7.00E−04 |
| RS10491185 | 1348 | | | 17 | 58614495 | 7.00E−04 |
| RS7523565 | 12 | | | 1 | 67783013 | 8.00E−04 |
| RS243965 | 399 | | | 4 | 111647482 | 8.00E−04 |
| RS2333467 | 465 | | | 4 | 177731837 | 8.00E−04 |
| RS921691 | 466 | | | 4 | 177735818 | 8.00E−04 |
| RS1158815 | 482 | | | 4 | 188232341 | 8.00E−04 |
| RS1547641 | 623 | | | 6 | 23833200 | 8.00E−04 |
| RS2182068 | 625 | | | 6 | 23845925 | 8.00E−04 |
| RS6938470 | 640 | | | 6 | 47446050 | 8.00E−04 |
| RS351572 | 782 | MSR1 | 4481 | 8 | 16065839 | 8.00E−04 |
| RS665889 | 915 | | | 9 | 85011765 | 8.00E−04 |
| RS10500747 | 1045 | | | 11 | 11728465 | 8.00E−04 |
| RS2447455 | 1349 | TANC2 | 26115 | 17 | 58623570 | 8.00E−04 |
| RS10502440 | 1372 | LAMA3 | 3909 | 18 | 19583575 | 8.00E−04 |
| RS696619 | 58 | F3 | 2152 | 1 | 94717241 | 9.00E−04 |
| RS3770899 | 163 | CRIM1 | 51232 | 2 | 36566423 | 9.00E−04 |
| RS3772781 | 300 | KALRN | 8997 | 3 | 125870129 | 9.00E−04 |
| RS10518393 | 407 | | | 4 | 122870458 | 9.00E−04 |
| RS1021019 | 408 | | | 4 | 122888607 | 9.00E−04 |
| RS1462069 | 486 | | | 4 | 188639576 | 9.00E−04 |
| RS2873911 | 505 | | | 5 | 25065918 | 9.00E−04 |
| RS1052981 | 719 | SFRP4 | 6424 | 7 | 37719741 | 9.00E−04 |
| RS1915546 | 841 | | | 8 | 80202606 | 9.00E−04 |
| RS10491186 | 1347 | | | 17 | 58558080 | 9.00E−04 |
| RS2460110 | 1350 | TANC2 | 26115 | 17 | 58672929 | 9.00E−04 |
| RS948435 | 1373 | LAMA3 | 3909 | 18 | 19637770 | 9.00E−04 |
| RS787493 | 14 | | | 1 | 67797740 | 1.00E−03 |
| RS1418005 | 26 | | | 1 | 69659645 | 1.00E−03 |
| RS891251 | 131 | | | 2 | 5958628 | 1.00E−03 |
| RS2291079 | 301 | ITGB5 | 3693 | 3 | 125965779 | 1.00E−03 |
| RS309753 | 468 | | | 4 | 177749792 | 1.00E−03 |
| RS2118763 | 513 | | | 5 | 44823303 | 1.00E−03 |
| RS35943 | 520 | ARL15 | 54622 | 5 | 53638314 | 1.00E−03 |
| RS7701690 | 521 | | | 5 | 53655784 | 1.00E−03 |
| RS224938 | 538 | | | 5 | 81752932 | 1.00E−03 |
| RS10491243 | 539 | | | 5 | 81770568 | 1.00E−03 |
| RS2461055 | 851 | | | 8 | 80832082 | 1.00E−03 |
| RS10513299 | 941 | ASTN2 | 23245 | 9 | 117184531 | 1.00E−03 |
| RS10508902 | 982 | MAPK8 | 5599 | 10 | 49311187 | 1.00E−03 |
| RS397618 | 1063 | TMEM16C | 63982 | 11 | 26546754 | 1.00E−03 |
| RS293970 | 1064 | TMEM16C | 63982 | 11 | 26549918 | 1.00E−03 |
| RS2278016 | 1308 | | | 16 | 50674510 | 1.00E−03 |
| RS1526211 | 219 | | | 2 | 184836469 | 1.10E−03 |
| RS9290552 | 311 | NAALADL2 | 254827 | 3 | 176588518 | 1.10E−03 |
| RS4611835 | 313 | NAALADL2 | 254827 | 3 | 176610777 | 1.10E−03 |
| RS1961547 | 368 | | | 4 | 83623512 | 1.10E−03 |
| RS10512865 | 514 | | | 5 | 44859124 | 1.10E−03 |
| RS2410410 | 797 | LOC646444 | 646444 | 8 | 16370342 | 1.10E−03 |
| RS10504694 | 842 | | | 8 | 80203155 | 1.10E−03 |
| RS10491854 | 948 | | | 9 | 117454034 | 1.10E−03 |
| RS1926256 | 22 | | | 1 | 69591095 | 1.20E−03 |
| RS1358091 | 220 | | | 2 | 184853176 | 1.20E−03 |
| RS10512629 | 299 | KALRN | 8997 | 3 | 125870100 | 1.20E−03 |
| RS725882 | 409 | | | 4 | 122925927 | 1.20E−03 |
| RS1351633 | 512 | | | 5 | 44579608 | 1.20E−03 |
| RS725819 | 626 | | | 6 | 23849815 | 1.20E−03 |
| RS534196 | 914 | | | 9 | 84907936 | 1.20E−03 |
| RS1621212 | 1033 | ADAM12 | 8038 | 10 | 127831272 | 1.20E−03 |
| RS2193849 | 312 | NAALADL2 | 254827 | 3 | 176601367 | 1.30E−03 |
| RS997720 | 373 | HNRPDL | 9987 | 4 | 83702325 | 1.30E−03 |
| RS250388 | 519 | ARL15 | 54622 | 5 | 53621019 | 1.30E−03 |
| RS997933 | 555 | | | 5 | 113212110 | 1.30E−03 |
| RS1480147 | 793 | | | 8 | 16170358 | 1.30E−03 |
| RS10510150 | 1031 | ADAM12 | 8038 | 10 | 127778924 | 1.30E−03 |
| RS293974 | 1062 | TMEM16C | 63982 | 11 | 26546702 | 1.30E−03 |
| RS7945560 | 1065 | TMEM16C | 63982 | 11 | 26565073 | 1.30E−03 |
| RS1526212 | 218 | | | 2 | 184836363 | 1.40E−03 |
| RS3772812 | 302 | ITGB5 | 3693 | 3 | 125966523 | 1.40E−03 |
| RS2348205 | 401 | | | 4 | 111671174 | 1.40E−03 |
| RS224939 | 537 | | | 5 | 81752858 | 1.40E−03 |
| RS10519364 | 553 | | | 5 | 113207846 | 1.40E−03 |
| RS1351608 | 554 | | | 5 | 113208536 | 1.40E−03 |
| RS4712495 | 612 | | | 6 | 10379610 | 1.40E−03 |
| RS1851006 | 1278 | UNC13C | 440279 | 15 | 52691684 | 1.40E−03 |
| RS10493872 | 55 | ABCD3 | 5825 | 1 | 94602439 | 1.50E−03 |
| RS257342 | 597 | | | 5 | 170997873 | 1.50E−03 |
| RS4510935 | 945 | | | 9 | 117364905 | 1.50E−03 |
| RS577379 | 1174 | SGCG | 6445 | 13 | 22653788 | 1.50E−03 |
| RS787534 | 11 | | | 1 | 67758546 | 1.60E−03 |
| RS6748937 | 221 | | | 2 | 184855451 | 1.60E−03 |
| RS243969 | 398 | | | 4 | 111646074 | 1.60E−03 |
| RS9307353 | 402 | | | 4 | 111671460 | 1.60E−03 |
| RS1027045 | 403 | | | 4 | 111677367 | 1.60E−03 |
| RS2037724 | 798 | LOC646444 | 646444 | 8 | 16370653 | 1.60E−03 |
| RS10504825 | 857 | CPNE3 | 8895 | 8 | 87636964 | 1.60E−03 |
| RS10513297 | 940 | ASTN2 | 23245 | 9 | 117130017 | 1.60E−03 |
| RS1278305 | 1032 | ADAM12 | 8038 | 10 | 127801415 | 1.60E−03 |
| RS959988 | 1164 | SLC15A4 | 121260 | 12 | 127817474 | 1.60E−03 |
| RS9304979 | 1408 | | | 19 | 20949974 | 1.60E−03 |
| RS10494858 | 101 | LOC388730 | 388730 | 1 | 201784380 | 1.70E−03 |
| RS3738154 | 102 | RBBP5 | 5929 | 1 | 201795606 | 1.70E−03 |
| RS726128 | 406 | | | 4 | 122870136 | 1.70E−03 |
| RS224940 | 536 | | | 5 | 81752818 | 1.70E−03 |
| RS7734201 | 552 | | | 5 | 113206989 | 1.70E−03 |
| RS899557 | 595 | | | 5 | 170994216 | 1.70E−03 |
| RS1324673 | 622 | | | 6 | 23820609 | 1.70E−03 |
| RS370067 | 783 | MSR1 | 4481 | 8 | 16088284 | 1.70E−03 |
| RS2220486 | 1162 | DKFZp761O2018 | 92293 | 12 | 127617021 | 1.70E−03 |
| RS1591678 | 31 | | | 1 | 80888871 | 1.80E−03 |
| RS10495528 | 132 | | | 2 | 6008445 | 1.80E−03 |
| RS657715 | 298 | KALRN | 8997 | 3 | 125845712 | 1.80E−03 |
| RS10520349 | 469 | | | 4 | 177765746 | 1.80E−03 |
| RS1905155 | 556 | | | 5 | 113301097 | 1.80E−03 |
| RS10488617 | 717 | TXNDC3 | 51314 | 7 | 37710273 | 1.80E−03 |
| RS2170116 | 791 | | | 8 | 16157007 | 1.80E−03 |
| RS2369693 | 839 | | | 8 | 80179994 | 1.80E−03 |
| RS10504693 | 840 | | | 8 | 80180116 | 1.80E−03 |
| RS6478298 | 939 | ASTN2 | 23245 | 9 | 117074245 | 1.80E−03 |
| RS10512498 | 1346 | | | 17 | 58507111 | 1.80E−03 |
| RS10493813 | 47 | | | 1 | 88583281 | 1.90E−03 |
| RS1026947 | 328 | | | 4 | 27588429 | 1.90E−03 |
| RS1462070 | 487 | | | 4 | 188639972 | 1.90E−03 |
| RS243768 | 650 | | | 6 | 54445089 | 1.90E−03 |
| RS10504710 | 847 | | | 8 | 80781801 | 1.90E−03 |
| RS10494860 | 103 | RIPK5 | 25778 | 1 | 201899456 | 2.00E−03 |
| RS10512920 | 494 | ADCY2 | 108 | 5 | 7455561 | 2.00E−03 |
| RS9325782 | 790 | | | 8 | 16134844 | 2.00E−03 |
| RS3909730 | 838 | | | 8 | 80175151 | 2.00E−03 |
| RS2398417 | 1163 | DKFZp761O2018 | 92293 | 12 | 127678424 | 2.00E−03 |
| RS10491088 | 1330 | GAS7 | 8522 | 17 | 9808904 | 2.00E−03 |
| RS10495529 | 133 | | | 2 | 6032408 | 2.10E−03 |
| RS10497645 | 222 | | | 2 | 184855798 | 2.10E−03 |
| RS4673011 | 243 | | | 2 | 222728693 | 2.10E−03 |
| RS1354083 | 297 | KALRN | 8997 | 3 | 125842553 | 2.10E−03 |
| RS1035093 | 327 | | | 4 | 27588012 | 2.10E−03 |
| RS10512855 | 511 | | | 5 | 44546969 | 2.10E−03 |
| RS1445829 | 522 | | | 5 | 53663936 | 2.10E−03 |
| RS1343496 | 665 | | | 6 | 78284325 | 2.10E−03 |
| RS1545442 | 720 | EPDR1 | 54749 | 7 | 37761531 | 2.10E−03 |
| RS2163120 | 792 | | | 8 | 16165538 | 2.10E−03 |
| RS7032150 | 928 | SVEP1 | 79987 | 9 | 110320280 | 2.10E−03 |
| RS10508903 | 983 | MAPK8 | 5599 | 10 | 49311338 | 2.10E−03 |
| RS1676741 | 1034 | ADAM12 | 8038 | 10 | 127841520 | 2.10E−03 |
| RS10500748 | 1046 | | | 11 | 11728555 | 2.10E−03 |
| RS10502470 | 1378 | KCTD1 | 284252 | 18 | 22452475 | 2.10E−03 |
| RS960202 | 48 | | | 1 | 88605059 | 2.20E−03 |
| RS10497651 | 217 | | | 2 | 184818615 | 2.20E−03 |
| RS10512921 | 495 | ADCY2 | 108 | 5 | 7455656 | 2.20E−03 |
| RS10520900 | 506 | | | 5 | 25102703 | 2.20E−03 |
| RS1317538 | 660 | KCNQ5 | 56479 | 6 | 73706132 | 2.20E−03 |
| RS420931 | 784 | MSR1 | 4481 | 8 | 16088316 | 2.20E−03 |
| RS1672168 | 875 | | | 8 | 108590185 | 2.20E−03 |
| RS1929496 | 921 | | | 9 | 101346508 | 2.20E−03 |
| RS33350 | 1307 | | | 16 | 50608803 | 2.20E−03 |
| RS1942578 | 1402 | | | 18 | 73322001 | 2.20E−03 |
| RS6692241 | 108 | USH2A | 7399 | 1 | 212598067 | 2.30E−03 |
| RS243972 | 397 | | | 4 | 111644685 | 2.30E−03 |
| RS631807 | 613 | LOC442161 | 442161 | 6 | 10475686 | 2.30E−03 |
| RS1586681 | 912 | | | 9 | 84876988 | 2.30E−03 |
| RS1169429 | 913 | | | 9 | 84893406 | 2.30E−03 |
| RS1013985 | 949 | | | 9 | 117454462 | 2.30E−03 |
| RS7983559 | 1170 | | | 13 | 22616580 | 2.30E−03 |
| RS1805082 | 1370 | NPC1 | 4864 | 18 | 19374442 | 2.30E−03 |
| RS632301 | 1380 | | | 18 | 22616756 | 2.30E−03 |
| RS4131672 | 1403 | | | 18 | 73380972 | 2.30E−03 |
| RS1926289 | 16 | | | 1 | 68177953 | 2.40E−03 |
| RS10489000 | 326 | | | 4 | 27586912 | 2.40E−03 |
| RS243976 | 396 | | | 4 | 111641384 | 2.40E−03 |
| RS1485870 | 453 | LOC442117 | 442117 | 4 | 173125585 | 2.40E−03 |
| RS10519689 | 569 | SRFBP1 | 153443 | 5 | 121347888 | 2.40E−03 |
| RS4397191 | 661 | KCNQ5 | 56479 | 6 | 73789192 | 2.40E−03 |
| RS10503574 | 779 | MSR1 | 4481 | 8 | 16028961 | 2.40E−03 |
| RS1565741 | 804 | | | 8 | 16799856 | 2.40E−03 |
| RS57740 | 1409 | | | 19 | 21223021 | 2.40E−03 |
| RS4650488 | 38 | | | 1 | 80995749 | 2.50E−03 |
| RS4704408 | 532 | PDE8B | 8622 | 5 | 76670405 | 2.50E−03 |
| RS10498887 | 662 | KCNQ5 | 56479 | 6 | 73797585 | 2.50E−03 |
| RS10512405 | 927 | SVEP1 | 79987 | 9 | 110316352 | 2.50E−03 |
| RS871120 | 938 | ASTN2 | 23245 | 9 | 117073775 | 2.50E−03 |
| RS1837993 | 1300 | | | 15 | 96618609 | 2.50E−03 |
| RS10491089 | 1331 | GAS7 | 8522 | 17 | 9828100 | 2.50E−03 |
| RS2077811 | 1379 | | | 18 | 22558197 | 2.50E−03 |
| RS1607664 | 1410 | ZNF429 | 353088 | 19 | 21497820 | 2.50E−03 |
| RS10495015 | 110 | USH2A | 7399 | 1 | 212647859 | 2.60E−03 |
| RS992454 | 244 | | | 2 | 222730366 | 2.60E−03 |
| RS1484258 | 325 | | | 4 | 27585846 | 2.60E−03 |
| RS4555709 | 347 | SCFD2 | 152579 | 4 | 53867889 | 2.60E−03 |
| RS171785 | 596 | | | 5 | 170994432 | 2.60E−03 |
| RS1721062 | 805 | | | 8 | 16857802 | 2.60E−03 |
| RS10489547 | 27 | | | 1 | 69681098 | 2.70E−03 |
| RS6540927 | 107 | USH2A | 7399 | 1 | 212581393 | 2.70E−03 |
| RS10512866 | 515 | | | 5 | 44859710 | 2.70E−03 |
| RS250387 | 518 | ARL15 | 54622 | 5 | 53620394 | 2.70E−03 |
| RS9327238 | 570 | SRFBP1 | 153443 | 5 | 121347997 | 2.70E−03 |
| RS1213382 | 666 | | | 6 | 78284528 | 2.70E−03 |
| RS1025926 | 829 | TRPA1 | 8989 | 8 | 73115712 | 2.70E−03 |
| RS4908087 | 71 | | | 1 | 100800615 | 2.80E−03 |
| RS10490876 | 314 | NAALADL2 | 254827 | 3 | 176634491 | 2.80E−03 |
| RS10517214 | 343 | | | 4 | 48101753 | 2.80E−03 |
| RS10512922 | 496 | ADCY2 | 108 | 5 | 7457278 | 2.80E−03 |
| RS631269 | 649 | | | 6 | 54417196 | 2.80E−03 |
| RS10503575 | 778 | MSR1 | 4481 | 8 | 16026250 | 2.80E−03 |
| RS1379742 | 863 | CNGB3 | 54714 | 8 | 87780661 | 2.80E−03 |
| RS722833 | 1332 | GAS7 | 8522 | 17 | 9876974 | 2.80E−03 |
| RS540970 | 1377 | KCTD1 | 284252 | 18 | 22430481 | 2.80E−03 |
| RS4715005 | 641 | | | 6 | 47472916 | 2.90E−03 |
| RS10504524 | 830 | TRPA1 | 8989 | 8 | 73118445 | 2.90E−03 |
| RS1025927 | 831 | TRPA1 | 8989 | 8 | 73125689 | 2.90E−03 |
| RS10491092 | 1333 | GAS7 | 8522 | 17 | 9945918 | 2.90E−03 |
| RS2822668 | 1433 | | | 21 | 14752268 | 2.90E−03 |
| RS841337 | 59 | | | 1 | 94853548 | 3.00E−03 |
| RS1033017 | 188 | MALL | 7851 | 2 | 110210596 | 3.00E−03 |
| RS696236 | 279 | PRICKLE2 | 166336 | 3 | 64184258 | 3.00E−03 |
| RS10519692 | 571 | | | 5 | 121423648 | 3.00E−03 |
| RS666336 | 802 | | | 8 | 16758689 | 3.00E−03 |
| RS1025928 | 832 | TRPA1 | 8989 | 8 | 73125812 | 3.00E−03 |
| RS2297355 | 920 | C9orf125 | 84302 | 9 | 101323312 | 3.00E−03 |
| RS1931321 | 926 | SVEP1 | 79987 | 9 | 110285257 | 3.00E−03 |
| RS1556082 | 1215 | GPC6 | 10082 | 13 | 93502465 | 3.00E−03 |
| RS185266 | 1305 | | | 16 | 50595102 | 3.00E−03 |
| RS2059232 | 1306 | | | 16 | 50596704 | 3.00E−03 |
| RS2822665 | 1432 | | | 21 | 14744278 | 3.00E−03 |
| RS10495014 | 109 | USH2A | 7399 | 1 | 212609915 | 3.10E−03 |
| RS7564203 | 134 | | | 2 | 6032465 | 3.10E−03 |
| RS553346 | 471 | | | 4 | 177769311 | 3.10E−03 |
| RS715428 | 1365 | KIAA1772 | 80000 | 18 | 17131449 | 3.10E−03 |
| RS9284616 | 360 | FRAS1 | 80144 | 4 | 79349710 | 3.20E−03 |
| RS10520899 | 507 | | | 5 | 25103129 | 3.20E−03 |
| RS251422 | 531 | PDE8B | 8622 | 5 | 76609190 | 3.20E−03 |
| RS10514096 | 533 | PDE8B | 8622 | 5 | 76700940 | 3.20E−03 |
| RS2150738 | 919 | C9orf125 | 84302 | 9 | 101320263 | 3.20E−03 |
| RS1033702 | 1255 | KIAA1622 | 57718 | 14 | 93717052 | 3.20E−03 |
| RS888405 | 278 | PRICKLE2 | 166336 | 3 | 64176742 | 3.30E−03 |
| RS495497 | 451 | LOC442117 | 442117 | 4 | 173117269 | 3.30E−03 |
| RS2956538 | 572 | | | 5 | 121427436 | 3.30E−03 |
| RS942662 | 627 | | | 6 | 23850282 | 3.30E−03 |
| RS9296538 | 637 | | | 6 | 47302408 | 3.30E−03 |
| RS4706652 | 667 | | | 6 | 78303823 | 3.30E−03 |
| RS2044271 | 828 | TRPA1 | 8989 | 8 | 73114699 | 3.30E−03 |
| RS4773773 | 1216 | GPC6 | 10082 | 13 | 93509501 | 3.30E−03 |
| RS1362400 | 1315 | AYTL1 | 54947 | 16 | 54129326 | 3.30E−03 |
| RS1981134 | 72 | | | 1 | 100823226 | 3.40E−03 |
| RS3770857 | 167 | CRIM1 | 51232 | 2 | 36608196 | 3.40E−03 |
| RS10517279 | 345 | SCFD2 | 152579 | 4 | 53831522 | 3.40E−03 |
| RS9312637 | 346 | SCFD2 | 152579 | 4 | 53867664 | 3.40E−03 |
| RS1390165 | 450 | | | 4 | 173099567 | 3.40E−03 |
| RS33375 | 598 | | | 5 | 170998718 | 3.40E−03 |
| RS10503572 | 789 | | | 8 | 16131101 | 3.40E−03 |
| RS2278667 | 852 | | | 8 | 80877490 | 3.40E−03 |
| RS2986671 | 925 | SVEP1 | 79987 | 9 | 110272210 | 3.40E−03 |
| RS1797376 | 1133 | LGR5 | 8549 | 12 | 70247964 | 3.40E−03 |
| RS2854946 | 1259 | SERPINA5 | 5104 | 14 | 94118132 | 3.40E−03 |
| RS2681962 | 1276 | UNC13C | 440279 | 15 | 52685879 | 3.40E−03 |
| RS10521320 | 1316 | AYTL1 | 54947 | 16 | 54133662 | 3.40E−03 |
| RS9284617 | 361 | FRAS1 | 80144 | 4 | 79349747 | 3.50E−03 |
| RS10520350 | 472 | | | 4 | 177769342 | 3.50E−03 |
| RS10520903 | 502 | | | 5 | 24966468 | 3.50E−03 |
| RS1283712 | 869 | ANGPT1 | 284 | 8 | 108535430 | 3.50E−03 |
| RS763889 | 1297 | | | 15 | 96543742 | 3.50E−03 |
| RS10497642 | 216 | | | 2 | 184653938 | 3.60E−03 |
| RS714206 | 535 | | | 5 | 81752090 | 3.60E−03 |
| RS4512212 | 611 | | | 6 | 10379387 | 3.60E−03 |
| RS1458402 | 669 | | | 6 | 78319510 | 3.60E−03 |
| RS479600 | 918 | | | 9 | 101282358 | 3.60E−03 |
| RS719223 | 1217 | GPC6 | 10082 | 13 | 93532937 | 3.60E−03 |
| RS8182127 | 1313 | AYTL1 | 54947 | 16 | 54127098 | 3.60E−03 |
| RS10518184 | 359 | FRAS1 | 80144 | 4 | 79341261 | 3.70E−03 |
| RS2348213 | 404 | | | 4 | 111679063 | 3.70E−03 |
| RS432164 | 470 | | | 4 | 177766242 | 3.70E−03 |
| RS10520352 | 473 | | | 4 | 177805099 | 3.70E−03 |
| RS251421 | 530 | PDE8B | 8622 | 5 | 76608726 | 3.70E−03 |
| RS1795462 | 1132 | LGR5 | 8549 | 12 | 70247867 | 3.70E−03 |
| RS10521321 | 1314 | AYTL1 | 54947 | 16 | 54129064 | 3.70E−03 |
| RS2411290 | 344 | SCFD2 | 152579 | 4 | 53780438 | 3.80E−03 |
| RS494770 | 452 | LOC442117 | 442117 | 4 | 173117307 | 3.80E−03 |
| RS990763 | 481 | | | 4 | 188204165 | 3.80E−03 |
| RS1343493 | 668 | | | 6 | 78313564 | 3.80E−03 |
| RS293975 | 1061 | TMEM16C | 63982 | 11 | 26546076 | 3.80E−03 |
| RS959987 | 1165 | SLC15A4 | 121260 | 12 | 127817680 | 3.80E−03 |
| RS1442799 | 1298 | | | 15 | 96589992 | 3.80E−03 |
| RS10502436 | 1366 | KIAA1772 | 80000 | 18 | 17219520 | 3.80E−03 |
| RS9288572 | 245 | | | 2 | 222787868 | 3.90E−03 |
| RS1964670 | 362 | FRAS1 | 80144 | 4 | 79351645 | 3.90E−03 |
| RS10507325 | 1169 | | | 13 | 22615653 | 3.90E−03 |
| RS920690 | 1299 | | | 15 | 96590158 | 3.90E−03 |
| RS243840 | 1312 | MMP2 | 4313 | 16 | 54085660 | 3.90E−03 |
| RS1893290 | 1374 | LAMA3 | 3909 | 18 | 19696619 | 3.90E−03 |
| RS978313 | 17 | | | 1 | 68188495 | 4.00E−03 |
| RS548825 | 21 | | | 1 | 69563639 | 4.00E−03 |
| RS841338 | 60 | | | 1 | 94854749 | 4.00E−03 |
| RS6662930 | 100 | CNTN2 | 6900 | 1 | 201773122 | 4.00E−03 |
| RS10496435 | 189 | NPHP1 | 4867 | 2 | 110286548 | 4.00E−03 |
| RS1502887 | 358 | FRAS1 | 80144 | 4 | 79340562 | 4.00E−03 |
| RS1797374 | 1131 | LGR5 | 8549 | 12 | 70246800 | 4.00E−03 |
| RS1983657 | 1258 | SERPINA5 | 5104 | 14 | 94117046 | 4.00E−03 |
| RS3755214 | 162 | CRIM1 | 51232 | 2 | 36537729 | 4.10E−03 |
| RS1882233 | 181 | | | 2 | 76710013 | 4.10E−03 |
| RS2347597 | 584 | G3BP | 10146 | 5 | 151161511 | 4.10E−03 |
| RS10505109 | 876 | | | 8 | 108635047 | 4.10E−03 |
| RS1999598 | 929 | SVEP1 | 79987 | 9 | 110322993 | 4.10E−03 |
| RS1471013 | 1043 | | | 11 | 11697539 | 4.10E−03 |
| RS2822669 | 1434 | | | 21 | 14752449 | 4.10E−03 |
| RS766643 | 497 | ADCY2 | 108 | 5 | 7499889 | 4.20E−03 |
| RS1385290 | 777 | | | 8 | 15987084 | 4.20E−03 |
| RS1383160 | 788 | | | 8 | 16131054 | 4.20E−03 |
| RS10509210 | 1003 | | | 10 | 66125316 | 4.20E−03 |
| RS1410747 | 1218 | GPC6 | 10082 | 13 | 93533153 | 4.20E−03 |
| RS9284299 | 1277 | UNC13C | 440279 | 15 | 52685923 | 4.20E−03 |
| RS2010122 | 1296 | | | 15 | 96543545 | 4.20E−03 |
| RS4800741 | 1367 | KIAA1772 | 80000 | 18 | 17327951 | 4.20E−03 |
| RS963552 | 180 | | | 2 | 76708216 | 4.30E−03 |
| RS1675511 | 284 | | | 3 | 99775373 | 4.30E−03 |
| RS2704404 | 342 | | | 4 | 48075472 | 4.30E−03 |
| RS487474 | 646 | | | 6 | 54364173 | 4.30E−03 |
| RS3913991 | 647 | | | 6 | 54402115 | 4.30E−03 |
| RS243818 | 648 | | | 6 | 54404636 | 4.30E−03 |
| RS724201 | 1130 | LGR5 | 8549 | 12 | 70242280 | 4.30E−03 |
| RS10493933 | 73 | | | 1 | 100823303 | 4.40E−03 |
| RS10495526 | 130 | | | 2 | 5957046 | 4.40E−03 |
| RS985343 | 182 | | | 2 | 76823437 | 4.40E−03 |
| RS1549920 | 583 | | | 5 | 151121037 | 4.40E−03 |
| RS1379782 | 1161 | | | 12 | 127583749 | 4.40E−03 |
| RS8042622 | 1280 | UNC13C | 440279 | 15 | 52692250 | 4.40E−03 |
| RS6114144 | 1426 | | | 20 | 23410022 | 4.40E−03 |
| RS1854510 | 63 | PAP2D | 163404 | 1 | 99102265 | 4.50E−03 |
| RS10517281 | 348 | SCFD2 | 152579 | 4 | 53868523 | 4.50E−03 |
| RS997721 | 374 | HNRPDL | 9987 | 4 | 83702471 | 4.50E−03 |
| RS4695953 | 459 | GLRA3 | 8001 | 4 | 176006441 | 4.50E−03 |
| RS1366236 | 586 | GLRA1 | 2741 | 5 | 151264796 | 4.50E−03 |
| RS2614059 | 811 | LOC389644 | 389644 | 8 | 28212815 | 4.50E−03 |
| RS10508900 | 977 | FRMPD2 | 143162 | 10 | 49126059 | 4.50E−03 |
| RS876705 | 1000 | | | 10 | 66057533 | 4.50E−03 |
| RS1389455 | 1066 | TMEM16C | 63982 | 11 | 26604761 | 4.50E−03 |
| RS555210 | 1096 | | | 11 | 94735784 | 4.50E−03 |
| RS10506057 | 1120 | | | 12 | 30159671 | 4.50E−03 |
| RS1280823 | 1129 | LGR5 | 8549 | 12 | 70210415 | 4.50E−03 |
| RS9317535 | 1175 | SGCG | 6445 | 13 | 22653892 | 4.50E−03 |
| RS1818711 | 1279 | UNC13C | 440279 | 15 | 52692074 | 4.50E−03 |
| RS9324714 | 585 | GLRA1 | 2741 | 5 | 151223956 | 4.60E−03 |
| RS10498888 | 663 | KCNQ5 | 56479 | 6 | 73800439 | 4.60E−03 |
| RS4497357 | 1067 | TMEM16C | 63982 | 11 | 26619122 | 4.60E−03 |
| RS10506055 | 1119 | | | 12 | 30097508 | 4.60E−03 |
| RS948720 | 1401 | | | 18 | 73314377 | 4.60E−03 |
| RS1571502 | 65 | PAP2D | 163404 | 1 | 99137091 | 4.70E−03 |
| RS349018 | 246 | | | 2 | 222789893 | 4.70E−03 |
| RS7696949 | 418 | | | 4 | 126771743 | 4.70E−03 |
| RS7826088 | 785 | | | 8 | 16106013 | 4.70E−03 |
| RS1480139 | 787 | | | 8 | 16129067 | 4.70E−03 |
| RS10501826 | 1097 | | | 11 | 94739512 | 4.70E−03 |
| RS1765618 | 54 | | | 1 | 94562596 | 4.80E−03 |
| RS1506363 | 417 | FAT4 | 79633 | 4 | 126759952 | 4.80E−03 |
| RS1382901 | 594 | | | 5 | 170969444 | 4.80E−03 |
| RS1915603 | 1004 | | | 10 | 66125650 | 4.80E−03 |
| RS6493693 | 1275 | UNC13C | 440279 | 15 | 52679875 | 4.80E−03 |
| RS2764536 | 28 | | | 1 | 69759261 | 4.90E−03 |
| RS2141494 | 285 | | | 3 | 99779985 | 4.90E−03 |
| RS999476 | 488 | | | 4 | 188660406 | 4.90E−03 |
| RS6902538 | 610 | | | 6 | 10377786 | 4.90E−03 |
| RS477516 | 800 | | | 8 | 16758362 | 4.90E−03 |
| RS1832331 | 30 | | | 1 | 80873358 | 5.00E−03 |
| RS4694890 | 341 | TEC | 7006 | 4 | 48067195 | 5.00E−03 |
| RS10519693 | 573 | | | 5 | 121427572 | 5.00E−03 |
| RS1459709 | 1035 | ADAM12 | 8038 | 10 | 127862818 | 5.00E−03 |
| RS3911569 | 1095 | | | 11 | 94735683 | 5.00E−03 |
| RS4656049 | 49 | | | 1 | 88656915 | 5.10E−03 |
| RS10510915 | 277 | PRICKLE2 | 166336 | 3 | 64169587 | 5.10E−03 |
| RS7117834 | 1047 | | | 11 | 11733493 | 5.10E−03 |
| RS787533 | 10 | | | 1 | 67758330 | 5.20E−03 |
| RS10489919 | 64 | PAP2D | 163404 | 1 | 99136909 | 5.20E−03 |
| RS10510912 | 275 | PRICKLE2 | 166336 | 3 | 64140589 | 5.20E−03 |
| RS10513288 | 937 | ASTN2 | 23245 | 9 | 117069393 | 5.20E−03 |
| RS10509209 | 1001 | | | 10 | 66120490 | 5.20E−03 |
| RS1915602 | 1002 | | | 10 | 66125009 | 5.20E−03 |
| RS9326628 | 190 | | | 2 | 110324042 | 5.30E−03 |
| RS2110509 | 329 | | | 4 | 27588882 | 5.30E−03 |
| RS393279 | 474 | | | 4 | 177816548 | 5.30E−03 |
| RS3816240 | 856 | CPNE3 | 8895 | 8 | 87636421 | 5.30E−03 |
| RS1062225 | 984 | MAPK8 | 5599 | 10 | 49313232 | 5.30E−03 |
| RS1072769 | 1117 | | | 12 | 30067073 | 5.30E−03 |
| RS723856 | 1435 | | | 21 | 14771576 | 5.30E−03 |
| RS1368080 | 146 | KBTBD9 | 114818 | 2 | 23623079 | 5.40E−03 |
| RS153717 | 276 | PRICKLE2 | 166336 | 3 | 64147033 | 5.40E−03 |
| RS1352058 | 458 | GLRA3 | 8001 | 4 | 175981135 | 5.40E−03 |
| RS10512876 | 516 | | | 5 | 45285361 | 5.40E−03 |
| RS1956456 | 1254 | KIAA1622 | 57718 | 14 | 93712715 | 5.40E−03 |
| RS1544299 | 111 | USH2A | 7399 | 1 | 212652783 | 5.50E−03 |
| RS10495524 | 126 | | | 2 | 5881900 | 5.50E−03 |
| RS10506054 | 1118 | | | 12 | 30096174 | 5.50E−03 |
| RS10518391 | 410 | ANXA5 | 308 | 4 | 122965453 | 5.60E−03 |
| RS4128165 | 457 | GLRA3 | 8001 | 4 | 175948433 | 5.60E−03 |
| RS10512919 | 493 | ADCY2 | 108 | 5 | 7455004 | 5.60E−03 |
| RS10512854 | 510 | | | 5 | 44546854 | 5.60E−03 |
| RS10498889 | 664 | KCNQ5 | 56479 | 6 | 73839097 | 5.60E−03 |
| RS899683 | 786 | | | 8 | 16113895 | 5.60E−03 |
| RS2136886 | 1411 | | | 19 | 21847999 | 5.60E−03 |
| RS7606048 | 145 | KBTBD9 | 114818 | 2 | 23545863 | 5.70E−03 |
| RS4655769 | 18 | | | 1 | 68188999 | 5.80E−03 |
| RS1430745 | 19 | | | 1 | 68258754 | 5.80E−03 |
| RS10495525 | 129 | | | 2 | 5937776 | 5.80E−03 |
| RS10490750 | 147 | KBTBD9 | 114818 | 2 | 23623216 | 5.80E−03 |
| RS1495291 | 449 | | | 4 | 173062483 | 5.80E−03 |
| RS4690697 | 464 | | | 4 | 177690238 | 5.80E−03 |
| RS411244 | 541 | | | 5 | 82242350 | 5.80E−03 |
| RS725937 | 582 | SPARC | 6678 | 5 | 151036904 | 5.80E−03 |
| RS4078145 | 1042 | | | 11 | 11620469 | 5.80E−03 |
| RS533926 | 1094 | | | 11 | 94716912 | 5.80E−03 |
| RS9322320 | 690 | C6orf96 | 55005 | 6 | 151844022 | 5.90E−03 |
| RS823603 | 806 | | | 8 | 16861200 | 5.90E−03 |
| RS2614060 | 812 | LOC389644 | 389644 | 8 | 28212897 | 5.90E−03 |
| RS10506053 | 1116 | | | 12 | 30061626 | 5.90E−03 |
| RS1992099 | 106 | USH2A | 7399 | 1 | 212556039 | 6.00E−03 |
| RS1912163 | 340 | TEC | 7006 | 4 | 48051581 | 6.00E−03 |
| RS3800273 | 691 | C6orf96 | 55005 | 6 | 151851149 | 6.00E−03 |
| RS2983301 | 1427 | | | 20 | 23434589 | 6.00E−03 |
| RS1709329 | 148 | KBTBD9 | 114818 | 2 | 23634850 | 6.10E−03 |
| RS10488616 | 716 | TXNDC3 | 51314 | 7 | 37706299 | 6.10E−03 |
| RS4112759 | 944 | | | 9 | 117313823 | 6.10E−03 |
| RS1877568 | 303 | ITGB5 | 3693 | 3 | 125966877 | 6.20E−03 |
| RS1818704 | 1274 | UNC13C | 440279 | 15 | 52679696 | 6.20E−03 |
| RS10492899 | 1304 | | | 16 | 50583588 | 6.20E−03 |
| RS930528 | 1351 | TANC2 | 26115 | 17 | 58680003 | 6.20E−03 |
| RS10495530 | 135 | | | 2 | 6034027 | 6.30E−03 |
| RS10489920 | 66 | PAP2D | 163404 | 1 | 99146514 | 6.40E−03 |
| RS1346612 | 128 | | | 2 | 5936521 | 6.40E−03 |
| RS6867905 | 560 | | | 5 | 113473289 | 6.40E−03 |
| RS2410373 | 776 | | | 8 | 15968877 | 6.40E−03 |
| RS10502475 | 1376 | KCTD1 | 284252 | 18 | 22427942 | 6.40E−03 |
| RS10518467 | 416 | FAT4 | 79633 | 4 | 126755739 | 6.50E−03 |
| RS10514098 | 534 | PDE8B | 8622 | 5 | 76740837 | 6.50E−03 |
| RS6940110 | 609 | | | 6 | 10377050 | 6.50E−03 |
| RS716329 | 689 | ZBTB2 | 57621 | 6 | 151791227 | 6.50E−03 |
| RS723855 | 1436 | | | 21 | 14771745 | 6.50E−03 |
| RS1841544 | 286 | | | 3 | 99839093 | 6.60E−03 |
| RS2461063 | 846 | | | 8 | 80781668 | 6.60E−03 |
| RS953211 | 414 | FAT4 | 79633 | 4 | 126708654 | 6.70E−03 |
| RS10503585 | 801 | | | 8 | 16758568 | 6.70E−03 |
| RS2614074 | 813 | | | 8 | 28222739 | 6.70E−03 |
| RS10502439 | 1369 | NPC1 | 4864 | 18 | 19366772 | 6.70E−03 |
| RS989901 | 922 | | | 9 | 101346820 | 6.80E−03 |
| RS9284634 | 405 | | | 4 | 122864741 | 7.00E−03 |
| RS433563 | 542 | | | 5 | 82242557 | 7.00E−03 |
| RS2721304 | 559 | | | 5 | 113462331 | 7.00E−03 |
| RS726217 | 1430 | CST9 | 128822 | 20 | 23532116 | 7.00E−03 |
| RS1485871 | 454 | LOC442117 | 442117 | 4 | 173125753 | 7.10E−03 |
| RS10513300 | 942 | ASTN2 | 23245 | 9 | 117209760 | 7.20E−03 |
| RS3844028 | 74 | | | 1 | 100823636 | 7.30E−03 |
| RS1429235 | 127 | | | 2 | 5910112 | 7.30E−03 |
| RS6436292 | 247 | | | 2 | 222798248 | 7.30E−03 |
| RS115931 | 287 | ST3GAL6 | 10402 | 3 | 99952479 | 7.30E−03 |
| RS10518466 | 415 | FAT4 | 79633 | 4 | 126737972 | 7.30E−03 |
| RS1046852 | 20 | C1orf139 | 79971 | 1 | 68303125 | 7.40E−03 |
| RS3753855 | 99 | CNTN2 | 6900 | 1 | 201772383 | 7.40E−03 |
| RS1381115 | 810 | | | 8 | 28202690 | 7.40E−03 |
| RS976891 | 324 | | | 4 | 27585616 | 7.50E−03 |
| RS3800274 | 692 | C6orf96 | 55005 | 6 | 151851306 | 7.50E−03 |
| RS9322321 | 693 | C6orf96 | 55005 | 6 | 151851744 | 7.50E−03 |
| RS4570241 | 950 | | | 9 | 117476532 | 7.50E−03 |
| RS1571500 | 61 | PAP2D | 163404 | 1 | 99098314 | 7.70E−03 |
| RS4695357 | 339 | TEC | 7006 | 4 | 48040123 | 7.70E−03 |
| RS10513301 | 943 | ASTN2 | 23245 | 9 | 117241331 | 7.70E−03 |
| RS3848309 | 1309 | | | 16 | 50690687 | 7.70E−03 |
| RS3821359 | 288 | ST3GAL6 | 10402 | 3 | 99973295 | 7.80E−03 |
| RS27378 | 498 | ADCY2 | 108 | 5 | 7521560 | 7.90E−03 |
| RS2031393 | 621 | | | 6 | 23796368 | 7.90E−03 |
| RS1942598 | 1400 | | | 18 | 73276885 | 7.90E−03 |
| RS3734953 | 721 | EPDR1 | 54749 | 7 | 37763462 | 8.00E−03 |
| RS10484047 | 1260 | SERPINA5 | 5104 | 14 | 94118981 | 8.00E−03 |
| RS10519366 | 557 | | | 5 | 113326892 | 8.10E−03 |
| RS9296547 | 642 | | | 6 | 47474339 | 8.10E−03 |
| RS10491511 | 917 | | | 9 | 101259503 | 8.10E−03 |
| RS9304978 | 1407 | | | 19 | 20949730 | 8.10E−03 |
| RS10516086 | 599 | | | 5 | 171002992 | 8.20E−03 |
| RS2378672 | 911 | NTRK2 | 4915 | 9 | 84860588 | 8.20E−03 |
| RS7921148 | 998 | | | 10 | 66047006 | 8.20E−03 |
| RS2394081 | 999 | | | 10 | 66050572 | 8.20E−03 |
| RS10519377 | 561 | | | 5 | 113535053 | 8.30E−03 |
| RS1003203 | 1428 | LOC128820 | 128820 | 20 | 23477910 | 8.30E−03 |
| RS1700595 | 540 | | | 5 | 82242104 | 8.40E−03 |
| RS10502435 | 1368 | | | 18 | 17361089 | 8.40E−03 |
| RS1158167 | 1429 | | | 20 | 23526189 | 8.40E−03 |
| RS10493679 | 39 | | | 1 | 81046048 | 8.50E−03 |
| RS823600 | 807 | | | 8 | 16861804 | 8.50E−03 |
| RS10504523 | 827 | TRPA1 | 8989 | 8 | 73114044 | 8.50E−03 |
| RS10484886 | 614 | | | 6 | 10477661 | 8.60E−03 |
| RS2460605 | 1281 | UNC13C | 440279 | 15 | 52693011 | 8.60E−03 |
| RS7580778 | 187 | | | 2 | 109757198 | 8.70E−03 |
| RS2974490 | 558 | | | 5 | 113433775 | 8.70E−03 |
| RS1801758 | 1329 | GAS7 | 8522 | 17 | 9756951 | 8.70E−03 |
| RS306322 | 50 | | | 1 | 88673430 | 8.80E−03 |
| RS329204 | 916 | | | 9 | 85028966 | 8.80E−03 |
| RS564038 | 1093 | | | 11 | 94715938 | 8.80E−03 |
| RS10490874 | 310 | NAALADL2 | 254827 | 3 | 176538732 | 8.90E−03 |
| RS288989 | 1364 | ROCK1 | 6093 | 18 | 16836580 | 8.90E−03 |
| RS10495745 | 144 | KBTBD9 | 114818 | 2 | 23543335 | 9.00E−03 |
| RS2396817 | 636 | | | 6 | 47255521 | 9.10E−03 |
| RS470732 | 1166 | | | 12 | 128008175 | 9.10E−03 |
| RS9301934 | 1219 | GPC6 | 10082 | 13 | 93537860 | 9.20E−03 |
| RS10503827 | 814 | | | 8 | 28223645 | 9.30E−03 |
| RS10501054 | 1060 | TMEM16C | 63982 | 11 | 26536121 | 9.40E−03 |
| RS344924 | 15 | | | 1 | 67817474 | 9.80E−03 |
| RS10520158 | 183 | | | 2 | 76851929 | 9.80E−03 |
| RS293966 | 1059 | TMEM16C | 63982 | 11 | 26536069 | 9.80E−03 |
| RS10489918 | 62 | PAP2D | 163404 | 1 | 99101483 | 1.00E−02 |
| RS1956455 | 1253 | KIAA1622 | 57718 | 14 | 93711620 | 1.00E−02 |
| RS10506521 | 1352 | TANC2 | 26115 | 17 | 58695046 | 1.00E−02 |
| RS37551 | 543 | | | 5 | 82256024 | 1.02E−02 |
| RS10493814 | 51 | LOC401954 | 401954 | 1 | 88695848 | 1.06E−02 |
| RS1426935 | 456 | | | 4 | 175905195 | 1.06E−02 |
| RS10514245 | 544 | | | 5 | 82256614 | 1.06E−02 |
| RS10513731 | 315 | NAALADL2 | 254827 | 3 | 176661277 | 1.07E−02 |
| RS7950644 | 1098 | | | 11 | 94739539 | 1.08E−02 |
| RS10519378 | 563 | | | 5 | 113555966 | 1.11E−02 |
| RS10500214 | 1406 | ZNF85 | 7639 | 19 | 20914290 | 1.11E−02 |
| RS10520290 | 460 | GLRA3 | 8001 | 4 | 176006547 | 1.13E−02 |
| RS526715 | 799 | | | 8 | 16754047 | 1.13E−02 |
| RS293969 | 1056 | TMEM16C | 63982 | 11 | 26532067 | 1.13E−02 |
| RS29620 | 593 | | | 5 | 170969416 | 1.16E−02 |
| RS1519991 | 179 | | | 2 | 76698833 | 1.17E−02 |
| RS9326911 | 562 | | | 5 | 113535625 | 1.18E−02 |
| RS10501053 | 1058 | TMEM16C | 63982 | 11 | 26533301 | 1.20E−02 |
| RS10493425 | 9 | | | 1 | 67722148 | 1.22E−02 |
| RS871151 | 75 | | | 1 | 100835758 | 1.23E−02 |
| RS1018912 | 1412 | ZNF208 | 7757 | 19 | 21948425 | 1.24E−02 |
| RS724202 | 1057 | TMEM16C | 63982 | 11 | 26532254 | 1.26E−02 |
| RS8013924 | 1252 | OTUB2 | 78990 | 14 | 93572196 | 1.26E−02 |
| RS1382902 | 592 | | | 5 | 170969171 | 1.28E−02 |
| RS10516085 | 591 | | | 5 | 170949443 | 1.29E−02 |
| RS941490 | 1251 | | | 14 | 93508235 | 1.29E−02 |
| RS6891243 | 492 | | | 5 | 7414980 | 1.30E−02 |
| RS10502476 | 1381 | | | 18 | 22641232 | 1.31E−02 |
| RS10512915 | 491 | | | 5 | 7380172 | 1.35E−02 |
| RS1589273 | 184 | | | 2 | 76872376 | 1.38E−02 |
| RS4128873 | 1041 | GALNTL4 | 374378 | 11 | 11499597 | 1.38E−02 |
| RS896322 | 104 | TMCC2 | 9911 | 1 | 201941402 | 1.41E−02 |
| RS10520348 | 463 | | | 4 | 177636887 | 1.42E−02 |
| RS1552069 | 411 | | | 4 | 122983540 | 1.45E−02 |
| RS7937815 | 1048 | | | 11 | 11738741 | 1.52E−02 |
| RS10484046 | 1256 | | | 14 | 94077768 | 1.55E−02 |
| RS997280 | 1261 | LOC390503 | 390503 | 14 | 94171096 | 1.55E−02 |
| RS1342337 | 659 | KCNQ5 | 56479 | 6 | 73692956 | 1.57E−02 |
| RS3770949 | 161 | CRIM1 | 51232 | 2 | 36515414 | 1.58E−02 |
| RS1429220 | 125 | | | 2 | 5881639 | 1.67E−02 |
| RS2722897 | 815 | PNOC | 5368 | 8 | 28229116 | 1.68E−02 |
| RS10520288 | 455 | | | 4 | 175884923 | 1.69E−02 |
| RS1955649 | 1262 | | | 14 | 94196733 | 1.69E−02 |
| RS2200455 | 1160 | | | 12 | 127317497 | 1.77E−02 |
| RS1541679 | 523 | | | 5 | 53729676 | 1.79E−02 |
| RS9292042 | 517 | ARL15 | 54622 | 5 | 53572755 | 1.81E−02 |
| RS241068 | 1345 | | | 17 | 58441292 | 1.82E−02 |
| RS717806 | 160 | | | 2 | 36487186 | 1.94E−02 |
| RS7156546 | 1257 | | | 14 | 94078129 | 1.96E−02 |
| RS322401 | 480 | | | 4 | 188200452 | 1.99E−02 |
| RS167721 | 479 | | | 4 | 188154690 | 2.11E−02 |

[0177] TABLE 5
SNP markers with P-value less than 0.005 for APOE1 from t-test assuming
equal variaces between groups. Number of observations are marked by n1 and n2
and group avarages by avg1 and avg2.

| RS_id | SEQ_ID_no | Gene | Gene_id | Chr | Position | n1 | avg1 | n2 | avg2 | ttest | df | P-value |
|---|---|---|---|---|---|---|---|---|---|---|---|---|
| RS6954679 | 728 | | | 7 | 63134099 | 437 | 1.32 | 41 | 1.51 | 4.79 | 476 | 2.23E−06 |
| RS10502465 | 2490 | | | 18 | 20848719 | 446 | 1.32 | 30 | 1.53 | 4.74 | 474 | 2.83E−06 |
| RS1016579 | 881 | | | 8 | 129269143 | 399 | 1.32 | 25 | 1.54 | 4.61 | 422 | 5.34E−06 |
| RS1867584 | 985 | | | 10 | 49321355 | 190 | 1.4 | 244 | 1.29 | 4.52 | 432 | 8.00E−06 |
| RS295577 | 524 | NDUFA12L | 91942 | 5 | 60457592 | 455 | 1.32 | 13 | 1.62 | 4.51 | 466 | 8.21E−06 |
| RS10503626 | 808 | PSD3 | 23362 | 8 | 18591364 | 459 | 1.32 | 21 | 1.56 | 4.45 | 478 | 1.07E−05 |
| RS3912653 | 1091 | FAT3 | 120114 | 11 | 92135172 | 197 | 1.27 | 279 | 1.38 | 4.45 | 474 | 1.70E−05 |
| RS1792369 | 1090 | FAT3 | 120114 | 11 | 92092081 | 196 | 1.28 | 276 | 1.38 | 4.34 | 470 | 1.75E−05 |
| RS10498673 | 1912 | BMP6 | 654 | 6 | 7770256 | 406 | 1.31 | 68 | 1.45 | 4.28 | 472 | 2.26E−05 |
| RS2889611 | 2213 | | | 10 | 49321754 | 184 | 1.4 | 280 | 1.3 | 4.28 | 462 | 2.27E−05 |
| RS10498293 | 2380 | | | 14 | 27284686 | 417 | 1.31 | 65 | 1.45 | 4.27 | 480 | 2.36E−05 |
| RS2056247 | 1092 | | | 11 | 93315872 | 391 | 1.31 | 91 | 1.43 | 4.2 | 480 | 3.18E−05 |
| RS10507768 | 2359 | | | 13 | 68865849 | 19 | 1.56 | 441 | 1.32 | 4.15 | 458 | 3.96E−05 |
| RS295525 | 525 | | | 5 | 60508623 | 470 | 1.33 | 12 | 1.62 | 4.11 | 480 | 4.65E−05 |
| RS572241 | 2264 | FAT3 | 120114 | 11 | 91942082 | 269 | 1.29 | 199 | 1.38 | 4.04 | 466 | 6.25E−05 |
| RS10517836 | 1747 | | | 4 | 63541480 | 405 | 1.32 | 45 | 1.47 | 4.04 | 448 | 6.29E−05 |
| RS10508901 | 981 | MAPK8 | 5599 | 10 | 49297404 | 185 | 1.39 | 287 | 1.29 | 4.03 | 470 | 6.50E−05 |
| RS2503102 | 679 | LOC442238 | 442238 | 6 | 100650488 | 272 | 1.37 | 142 | 1.27 | 4.01 | 412 | 7.21E−05 |
| RS36617 | 2266 | FAT3 | 120114 | 11 | 91943638 | 278 | 1.29 | 202 | 1.38 | 3.97 | 478 | 8.29E−05 |
| RS2854946 | 1259 | SERPINA5 | 5104 | 14 | 94118132 | 321 | 1.3 | 91 | 1.41 | 3.97 | 410 | 8.49E−05 |
| RS4128928 | 1678 | | | 3 | 119083686 | 288 | 1.29 | 192 | 1.39 | 3.95 | 478 | 8.99E−05 |
| RS10508896 | 2210 | MARCH8 | 220972 | 10 | 45350649 | 451 | 1.34 | 29 | 1.16 | 3.95 | 478 | 8.99E−05 |
| RS10491855 | 947 | | | 9 | 119335541 | 347 | 1.31 | 123 | 1.41 | 3.94 | 468 | 9.39E−05 |
| RS352427 | 816 | | | 8 | 28571996 | 465 | 1.32 | 15 | 1.58 | 3.92 | 478 | 1.01E−04 |
| RS10501797 | 2276 | FAT3 | 120114 | 11 | 92167618 | 182 | 1.28 | 298 | 1.37 | 3.92 | 478 | 1.01E−04 |
| RS901682 | 2208 | MARCH8 | 220972 | 10 | 45285867 | 449 | 1.35 | 25 | 1.15 | 3.88 | 472 | 1.19E−04 |
| RS1893120 | 1788 | NDST4 | 64579 | 4 | 116230217 | 142 | 1.27 | 258 | 1.37 | 3.88 | 398 | 1.22E−04 |
| RS2425570 | 2554 | PTPRT | 11122 | 20 | 41111765 | 347 | 1.31 | 51 | 1.45 | 3.86 | 396 | 1.32E−04 |
| RS10509929 | 1021 | | | 10 | 112482278 | 55 | 1.45 | 405 | 1.32 | 3.83 | 458 | 1.46E−04 |
| RS7412987 | 1532 | LOC128153 | 128153 | 1 | 216013079 | 163 | 1.39 | 277 | 1.3 | 3.83 | 438 | 1.47E−04 |
| RS878016 | 757 | DLGAP2 | 9228 | 8 | 1585693 | 341 | 1.31 | 139 | 1.4 | 3.81 | 478 | 1.57E−04 |
| RS2474263 | 678 | LOC442238 | 442238 | 6 | 100641976 | 302 | 1.36 | 172 | 1.27 | 3.81 | 472 | 1.57E−04 |
| RS2045765 | 1760 | | | 4 | 63775688 | 421 | 1.32 | 57 | 1.45 | 3.8 | 476 | 1.63E−04 |
| RS2296697 | 40 | LPHN2 | 23266 | 1 | 82209807 | 393 | 1.31 | 75 | 1.43 | 3.79 | 466 | 1.70E−04 |
| RS10499436 | 2020 | | | 7 | 13649002 | 123 | 1.4 | 337 | 1.3 | 3.76 | 458 | 1.92E−04 |
| RS9317744 | 1176 | | | 13 | 22963766 | 433 | 1.33 | 11 | 1.61 | 3.74 | 442 | 2.08E−04 |
| RS7850478 | 946 | | | 9 | 119326659 | 356 | 1.31 | 126 | 1.4 | 3.73 | 480 | 2.14E−04 |
| RS2292889 | 2250 | DEPC-1 | 221120 | 11 | 43898353 | 94 | 1.25 | 378 | 1.35 | 3.73 | 470 | 2.15E−04 |
| RS2353296 | 1733 | | | 4 | 47956320 | 423 | 1.32 | 31 | 1.5 | 3.71 | 452 | 2.33E−04 |
| RS1961544 | 2559 | | | 21 | 19839174 | 402 | 1.32 | 24 | 1.52 | 3.71 | 424 | 2.35E−04 |
| RS7841198 | 2096 | PSD3 | 23362 | 8 | 18597648 | 447 | 1.32 | 31 | 1.49 | 3.7 | 476 | 2.41E−04 |
| RS250387 | 518 | ARL15 | 54622 | 5 | 53620394 | 399 | 1.31 | 77 | 1.43 | 3.69 | 474 | 2.50E−04 |
| RS10499437 | 2021 | | | 7 | 13649243 | 130 | 1.4 | 342 | 1.3 | 3.69 | 470 | 2.51E−04 |
| RS870241 | 1654 | FAM19A4 | 151647 | 3 | 68908072 | 324 | 1.31 | 126 | 1.41 | 3.69 | 448 | 2.52E−04 |
| RS10516125 | 1893 | | | 5 | 174413439 | 474 | 1.33 | 8 | 1.65 | 3.68 | 480 | 2.60E−04 |
| RS10488888 | 395 | | | 4 | 111503157 | 472 | 1.33 | 8 | 1.65 | 3.68 | 478 | 2.60E−04 |
| RS7792197 | 2055 | | | 7 | 87899449 | 446 | 1.32 | 32 | 1.49 | 3.68 | 476 | 2.60E−04 |
| RS10509702 | 1009 | | | 10 | 97914086 | 466 | 1.33 | 12 | 1.59 | 3.68 | 476 | 2.60E−04 |
| RS3760626 | 2533 | CLPTM1 | 1209 | 19 | 50148945 | 262 | 1.29 | 216 | 1.38 | 3.68 | 476 | 2.60E−04 |
| RS2072506 | 722 | AMPH | 273 | 7 | 38468920 | 442 | 1.32 | 30 | 1.5 | 3.68 | 470 | 2.60E−04 |
| RS6830598 | 1775 | NDST4 | 64579 | 4 | 116084463 | 161 | 1.39 | 259 | 1.3 | 3.68 | 418 | 2.64E−04 |
| RS10495074 | 1530 | LOC128153 | 128153 | 1 | 215998288 | 296 | 1.3 | 184 | 1.39 | 3.65 | 478 | 2.91E−04 |
| RS967326 | 2094 | PSD3 | 23362 | 8 | 18591541 | 448 | 1.32 | 32 | 1.49 | 3.65 | 478 | 2.91E−04 |
| RS1112809 | 210 | | | 2 | 148197197 | 420 | 1.35 | 50 | 1.21 | 3.65 | 468 | 2.92E−04 |
| RS10498292 | 1229 | | | 14 | 27284462 | 397 | 1.31 | 85 | 1.42 | 3.63 | 480 | 3.14E−04 |
| RS3827702 | 1423 | TASP1 | 55617 | 20 | 13446812 | 300 | 1.31 | 98 | 1.41 | 3.63 | 396 | 3.21E−04 |
| RS1528842 | 209 | | | 2 | 148174046 | 426 | 1.35 | 56 | 1.22 | 3.62 | 480 | 3.26E−04 |
| RS10512980 | 1823 | | | 5 | 51991165 | 319 | 1.36 | 151 | 1.27 | 3.62 | 468 | 3.27E−04 |
| RS3104997 | 2143 | | | 8 | 96630910 | 341 | 1.35 | 123 | 1.26 | 3.62 | 462 | 3.27E−04 |
| RS547008 | 2299 | | | 11 | 121523071 | 424 | 1.32 | 40 | 1.46 | 3.62 | 462 | 3.27E−04 |
| RS10516142 | 601 | FLT4 | 2324 | 5 | 180003769 | 474 | 1.33 | 8 | 1.64 | 3.61 | 480 | 3.38E−04 |
| RS10503573 | 780 | MSR1 | 4481 | 8 | 16047855 | 468 | 1.33 | 14 | 1.57 | 3.61 | 480 | 3.38E−04 |
| RS2793207 | 1900 | CDYL | 9425 | 6 | 4901002 | 447 | 1.33 | 17 | 1.55 | 3.59 | 462 | 3.66E−04 |
| RS1427421 | 1661 | MITF | 4286 | 3 | 69870404 | 410 | 1.32 | 44 | 1.46 | 3.59 | 452 | 3.67E−04 |
| RS10489688 | 1523 | | | 1 | 197054569 | 315 | 1.31 | 163 | 1.39 | 3.58 | 476 | 3.79E−04 |
| RS10518901 | 2441 | C15orf41 | 84529 | 15 | 34807406 | 256 | 1.3 | 192 | 1.38 | 3.58 | 446 | 3.81E−04 |
| RS4131462 | 1972 | | | 6 | 99364568 | 309 | 1.36 | 171 | 1.28 | 3.57 | 478 | 3.93E−04 |
| RS1499976 | 1684 | LOC389142 | 389142 | 3 | 119284020 | 369 | 1.3 | 101 | 1.4 | 3.57 | 468 | 3.94E−04 |
| RS10509448 | 1005 | NRG3 | 10718 | 10 | 83972610 | 432 | 1.32 | 20 | 1.52 | 3.57 | 450 | 3.95E−04 |
| RS758780 | 2036 | PTHB1 | 27241 | 7 | 33444985 | 302 | 1.3 | 180 | 1.39 | 3.56 | 480 | 4.08E−04 |
| RS758779 | 2037 | PTHB1 | 27241 | 7 | 33445083 | 302 | 1.3 | 180 | 1.39 | 3.56 | 480 | 4.08E−04 |
| RS2671762 | 1633 | | | 3 | 5110111 | 431 | 1.32 | 49 | 1.45 | 3.55 | 478 | 4.23E−04 |
| RS10514009 | 2530 | | | 18 | 67250588 | 449 | 1.32 | 31 | 1.49 | 3.55 | 478 | 4.23E−04 |
| RS950085 | 1006 | | | 10 | 95592637 | 139 | 1.37 | 199 | 1.28 | 3.56 | 336 | 4.24E−04 |
| RS1456196 | 293 | | | 3 | 119137243 | 358 | 1.31 | 84 | 1.41 | 3.55 | 440 | 4.27E−04 |
| RS2825673 | 2561 | | | 21 | 19888587 | 415 | 1.32 | 55 | 1.45 | 3.54 | 468 | 4.40E−04 |
| RS10492047 | 1158 | LOC144678 | 144678 | 12 | 125501283 | 457 | 1.32 | 25 | 1.5 | 3.53 | 480 | 4.56E−04 |
| RS4945630 | 1990 | | | 6 | 119472010 | 286 | 1.36 | 186 | 1.28 | 3.53 | 470 | 4.56E−04 |
| RS10484973 | 1966 | RIMS1 | 22999 | 6 | 72677020 | 366 | 1.32 | 98 | 1.42 | 3.52 | 462 | 4.74E−04 |
| RS2217610 | 700 | SDK1 | 221935 | 7 | 3697162 | 348 | 1.31 | 96 | 1.41 | 3.51 | 442 | 4.94E−04 |
| RS7107851 | 2287 | HEPHL1 | 341208 | 11 | 93396703 | 389 | 1.31 | 93 | 1.41 | 3.49 | 480 | 5.28E−04 |
| RS492681 | 2472 | | | 18 | 9853662 | 383 | 1.32 | 89 | 1.42 | 3.49 | 470 | 5.29E−04 |
| RS1945011 | 2298 | GRIK4 | 2900 | 11 | 120126812 | 395 | 1.35 | 83 | 1.25 | 3.48 | 476 | 5.48E−04 |
| RS2833581 | 2567 | HUNK | 30811 | 21 | 32254024 | 181 | 1.39 | 295 | 1.3 | 3.47 | 474 | 5.68E−04 |
| RS4122274 | 1873 | | | 5 | 102998589 | 152 | 1.39 | 320 | 1.31 | 3.47 | 470 | 5.68E−04 |
| RS10508895 | 2209 | MARCH8 | 220972 | 10 | 45287774 | 414 | 1.35 | 24 | 1.17 | 3.47 | 436 | 5.72E−04 |
| RS362865 | 2007 | GRM1 | 2911 | 6 | 146704527 | 414 | 1.35 | 64 | 1.23 | 3.45 | 476 | 6.10E−04 |
| RS4492337 | 2142 | C8orf37 | 157657 | 8 | 96336117 | 313 | 1.31 | 143 | 1.4 | 3.45 | 454 | 6.13E−04 |
| RS10487019 | 2056 | | | 7 | 87915131 | 449 | 1.32 | 31 | 1.48 | 3.44 | 478 | 6.33E−04 |
| RS261861 | 1550 | RGS7 | 6000 | 1 | 239162199 | 279 | 1.36 | 183 | 1.28 | 3.44 | 460 | 6.35E−04 |
| RS283086 | 1986 | SLC35F1 | 222553 | 6 | 118703634 | 187 | 1.3 | 207 | 1.38 | 3.44 | 392 | 6.44E−04 |
| RS2195989 | 872 | ANGPT1 | 284 | 8 | 108555088 | 69 | 1.43 | 393 | 1.32 | 3.43 | 460 | 6.58E−04 |
| RS2357344 | 1242 | SYNE2 | 23224 | 14 | 63578006 | 390 | 1.31 | 34 | 1.46 | 3.43 | 422 | 6.63E−04 |
| RS2362932 | 120 | SMYD3 | 64754 | 1 | 243980907 | 137 | 1.4 | 263 | 1.31 | 3.43 | 398 | 6.67E−04 |
| RS10506681 | 2328 | | | 12 | 73653196 | 308 | 1.3 | 172 | 1.39 | 3.42 | 478 | 6.80E−04 |
| RS1427422 | 1660 | | | 3 | 69866955 | 432 | 1.32 | 46 | 1.45 | 3.42 | 476 | 6.80E−04 |
| RS10485116 | 1946 | LOC653802 | 653802 | 6 | 42430492 | 467 | 1.33 | 9 | 1.61 | 3.41 | 474 | 7.05E−04 |
| RS665889 | 915 | | | 9 | 86972031 | 268 | 1.3 | 204 | 1.38 | 3.4 | 470 | 7.31E−04 |
| RS6109935 | 1424 | TASP1 | 55617 | 20 | 13467837 | 120 | 1.4 | 316 | 1.31 | 3.4 | 434 | 7.36E−04 |
| RS10521007 | 1822 | ADAMTS12 | 81792 | 5 | 33794319 | 383 | 1.35 | 99 | 1.26 | 3.39 | 480 | 7.57E−04 |
| RS7828096 | 2095 | PSD3 | 23362 | 8 | 18597554 | 449 | 1.32 | 31 | 1.48 | 3.38 | 478 | 7.84E−04 |
| RS1406444 | 1595 | | | 2 | 148189717 | 425 | 1.35 | 53 | 1.23 | 3.38 | 476 | 7.84E−04 |
| RS9306468 | 2570 | MTMR3 | 8897 | 22 | 28704281 | 373 | 1.35 | 103 | 1.26 | 3.38 | 474 | 7.85E−04 |
| RS1501622 | 1705 | FGF12 | 2257 | 3 | 193634069 | 187 | 1.28 | 285 | 1.36 | 3.38 | 470 | 7.85E−04 |
| RS1369592 | 2435 | | | 15 | 34185952 | 209 | 1.29 | 231 | 1.37 | 3.38 | 438 | 7.90E−04 |
| RS817504 | 1679 | | | 3 | 119161552 | 344 | 1.3 | 58 | 1.42 | 3.38 | 400 | 7.96E−04 |
| RS10517211 | 1717 | | | 4 | 30253481 | 421 | 1.32 | 61 | 1.43 | 3.37 | 480 | 8.12E−04 |
| RS950206 | 1791 | | | 4 | 116400004 | 179 | 1.28 | 297 | 1.36 | 3.37 | 474 | 8.13E−04 |
| RS10494717 | 1519 | | | 1 | 193195136 | 410 | 1.35 | 46 | 1.22 | 3.37 | 454 | 8.16E−04 |
| RS672489 | 1674 | | | 3 | 111133475 | 290 | 1.3 | 164 | 1.38 | 3.37 | 452 | 8.16E−04 |
| RS10516971 | 1769 | UNC5C | 8633 | 4 | 96560069 | 364 | 1.35 | 112 | 1.26 | 3.36 | 474 | 8.42E−04 |
| RS7874576 | 896 | | | 9 | 12600410 | 470 | 1.33 | 4 | 1.74 | 3.36 | 472 | 8.43E−04 |
| RS6902590 | 2008 | | | 6 | 148672183 | 146 | 1.39 | 326 | 1.31 | 3.36 | 470 | 8.43E−04 |
| RS2414689 | 1285 | RORA | 6095 | 15 | 59051547 | 75 | 1.4 | 189 | 1.29 | 3.37 | 262 | 8.65E−04 |
| RS580758 | 390 | | | 4 | 105790400 | 433 | 1.32 | 47 | 1.45 | 3.35 | 478 | 8.72E−04 |
| RS962592 | 476 | | | 4 | 181229107 | 474 | 1.33 | 6 | 1.67 | 3.35 | 478 | 8.72E−04 |
| RS6990997 | 867 | ZFPM2 | 23414 | 8 | 106881703 | 426 | 1.32 | 50 | 1.45 | 3.35 | 474 | 8.73E−04 |
| RS198278 | 711 | | | 7 | 24214718 | 224 | 1.29 | 236 | 1.37 | 3.35 | 458 | 8.75E−04 |
| RS4331176 | 2327 | | | 12 | 73652799 | 163 | 1.38 | 297 | 1.3 | 3.35 | 458 | 8.75E−04 |
| RS283063 | 1987 | SLC35F1 | 222553 | 6 | 118728007 | 444 | 1.32 | 36 | 1.47 | 3.34 | 478 | 9.03E−04 |
| RS4418368 | 758 | DLGAP2 | 9228 | 8 | 1585785 | 253 | 1.31 | 143 | 1.39 | 3.34 | 394 | 9.18E−04 |
| RS166861 | 2352 | | | 13 | 55557523 | 426 | 1.32 | 54 | 1.44 | 3.33 | 478 | 9.36E−04 |
| RS10510995 | 281 | | | 3 | 70525819 | 14 | 1.55 | 458 | 1.33 | 3.33 | 470 | 9.37E−04 |
| RS737911 | 2571 | MTMR3 | 8897 | 22 | 28729417 | 368 | 1.35 | 96 | 1.26 | 3.33 | 462 | 9.38E−04 |
| RS1851006 | 1278 | UNC13C | 440279 | 15 | 52691684 | 153 | 1.27 | 203 | 1.36 | 3.33 | 354 | 9.60E−04 |
| RS1467708 | 1526 | | | 1 | 203662300 | 289 | 1.33 | 39 | 1.47 | 3.33 | 326 | 9.68E−04 |
| RS1903154 | 2101 | | | 8 | 21140781 | 449 | 1.34 | 29 | 1.19 | 3.32 | 476 | 9.69E−04 |
| RS1828384 | 2335 | | | 12 | 114060113 | 248 | 1.3 | 230 | 1.37 | 3.32 | 476 | 9.69E−04 |
| RS10501811 | 2282 | | | 11 | 93309061 | 390 | 1.31 | 78 | 1.41 | 3.32 | 466 | 9.71E−04 |
| RS1871292 | 1646 | | | 3 | 35101859 | 279 | 1.34 | 39 | 1.21 | 3.33 | 316 | 9.71E−04 |
| RS1410364 | 1915 | | | 6 | 9837105 | 93 | 1.42 | 349 | 1.32 | 3.32 | 440 | 9.75E−04 |
| RS873651 | 2566 | C21orf41 | 54073 | 21 | 29703719 | 263 | 1.37 | 155 | 1.28 | 3.32 | 416 | 9.80E−04 |
| RS4564209 | 1531 | LOC128153 | 128153 | 1 | 215999639 | 312 | 1.3 | 168 | 1.38 | 3.31 | 478 | 1.00E−03 |
| RS2241577 | 1898 | KIAA1191 | 57179 | 5 | 175707471 | 398 | 1.32 | 78 | 1.42 | 3.31 | 474 | 1.00E−03 |
| RS717806 | 160 | | | 2 | 36429039 | 345 | 1.31 | 117 | 1.4 | 3.31 | 460 | 1.01E−03 |
| RS10497650 | 223 | | | 2 | 184931280 | 451 | 1.32 | 5 | 1.69 | 3.31 | 454 | 1.01E−03 |
| RS335251 | 2099 | PSD3 | 23362 | 8 | 18691618 | 146 | 1.39 | 332 | 1.31 | 3.3 | 476 | 1.04E−03 |
| RS10485494 | 2537 | CGI-09 | 51605 | 20 | 5867378 | 461 | 1.32 | 15 | 1.53 | 3.3 | 474 | 1.04E−03 |
| RS723043 | 157 | LTBP1 | 4052 | 2 | 33395291 | 249 | 1.3 | 177 | 1.38 | 3.3 | 424 | 1.05E−03 |
| RS6829390 | 338 | TEC | 7006 | 4 | 47893743 | 466 | 1.33 | 16 | 1.53 | 3.29 | 480 | 1.08E−03 |
| RS1280310 | 1485 | TCTEX1D1 | 200132 | 1 | 66989411 | 248 | 1.3 | 234 | 1.37 | 3.28 | 480 | 1.11E−03 |
| RS6919514 | 688 | UST | 10090 | 6 | 149151922 | 439 | 1.32 | 41 | 1.45 | 3.28 | 478 | 1.11E−03 |
| RS10484865 | 2011 | | | 6 | 153313545 | 452 | 1.34 | 22 | 1.16 | 3.28 | 472 | 1.11E−03 |
| RS4131954 | 2324 | | | 12 | 73597675 | 167 | 1.38 | 303 | 1.3 | 3.28 | 468 | 1.12E−03 |
| RS10521316 | 2461 | | | 16 | 53286727 | 243 | 1.3 | 223 | 1.38 | 3.28 | 464 | 1.12E−03 |
| RS1298362 | 1136 | | | 12 | 74493708 | 216 | 1.29 | 242 | 1.36 | 3.28 | 456 | 1.12E−03 |
| RS32218 | 1876 | FBN2 | 2201 | 5 | 127719132 | 357 | 1.32 | 93 | 1.41 | 3.28 | 448 | 1.12E−03 |
| RS10508158 | 2371 | | | 13 | 105045125 | 309 | 1.35 | 139 | 1.27 | 3.28 | 446 | 1.12E−03 |
| RS2060180 | 2018 | SDK1 | 221935 | 7 | 3696083 | 347 | 1.31 | 93 | 1.41 | 3.28 | 438 | 1.12E−03 |
| RS10508903 | 983 | MAPK8 | 5599 | 10 | 49311338 | 208 | 1.39 | 212 | 1.3 | 3.28 | 418 | 1.13E−03 |
| RS1919447 | 1593 | | | 2 | 148179334 | 420 | 1.35 | 52 | 1.23 | 3.27 | 470 | 1.15E−03 |
| RS2018842 | 1696 | | | 3 | 148362044 | 279 | 1.36 | 193 | 1.29 | 3.27 | 470 | 1.15E−03 |
| RS1519684 | 1983 | | | 6 | 114571663 | 174 | 1.38 | 296 | 1.3 | 3.27 | 468 | 1.15E−03 |
| RS1374028 | 1825 | PDE4D | 5144 | 5 | 58611588 | 398 | 1.34 | 34 | 1.19 | 3.27 | 430 | 1.16E−03 |
| RS637225 | 1517 | | | 1 | 192302414 | 207 | 1.38 | 219 | 1.3 | 3.27 | 424 | 1.16E−03 |
| RS763553 | 2112 | | | 8 | 31565038 | 232 | 1.3 | 116 | 1.39 | 3.27 | 346 | 1.18E−03 |
| RS2291386 | 2013 | SYTL3 | 94120 | 6 | 159104495 | 456 | 1.32 | 26 | 1.49 | 3.26 | 480 | 1.19E−03 |
| RS4350286 | 2217 | | | 10 | 49997106 | 140 | 1.39 | 336 | 1.31 | 3.26 | 474 | 1.19E−03 |
| RS1542731 | 1521 | | | 1 | 193349361 | 45 | 1.22 | 433 | 1.34 | 3.25 | 476 | 1.24E−03 |
| RS4611835 | 313 | NAALADL2 | 254827 | 3 | 176610769 | 444 | 1.33 | 22 | 1.5 | 3.25 | 464 | 1.24E−03 |
| RS10497649 | 1611 | | | 2 | 184930781 | 475 | 1.33 | 7 | 1.63 | 3.24 | 480 | 1.28E−03 |
| RS965158 | 868 | | | 8 | 107564094 | 471 | 1.33 | 11 | 1.57 | 3.24 | 480 | 1.28E−03 |
| RS2916 | 1484 | TCTEX1D1 | 200132 | 1 | 66989285 | 245 | 1.3 | 233 | 1.37 | 3.24 | 476 | 1.28E−03 |
| RS10495390 | 116 | RYR2 | 6262 | 1 | 235379636 | 432 | 1.32 | 44 | 1.45 | 3.24 | 474 | 1.28E−03 |
| RS548987 | 629 | SLC17A3 | 10786 | 6 | 25977350 | 442 | 1.32 | 34 | 1.46 | 3.24 | 474 | 1.28E−03 |
| RS6966318 | 2060 | IFRD1 | 3475 | 7 | 111880093 | 149 | 1.28 | 321 | 1.35 | 3.24 | 468 | 1.28E−03 |
| RS4510935 | 945 | | | 9 | 119325172 | 408 | 1.32 | 72 | 1.42 | 3.23 | 478 | 1.32E−03 |
| RS7838059 | 2083 | MSRA | 4482 | 8 | 10216220 | 387 | 1.32 | 53 | 1.44 | 3.23 | 438 | 1.33E−03 |
| RS2060184 | 2017 | SDK1 | 221935 | 7 | 3695551 | 374 | 1.31 | 108 | 1.4 | 3.22 | 480 | 1.37E−03 |
| RS796707 | 1979 | ATG5 | 9474 | 6 | 106800214 | 440 | 1.32 | 40 | 1.45 | 3.22 | 478 | 1.37E−03 |
| RS1497724 | 1714 | | | 4 | 27838505 | 265 | 1.36 | 213 | 1.29 | 3.22 | 476 | 1.37E−03 |
| RS7809161 | 2023 | DGKB | 1607 | 7 | 14739036 | 64 | 1.24 | 414 | 1.35 | 3.22 | 476 | 1.37E−03 |
| RS1416824 | 1548 | | | 1 | 237505708 | 436 | 1.34 | 38 | 1.21 | 3.22 | 472 | 1.37E−03 |
| RS10518900 | 2440 | C15orf41 | 84529 | 15 | 34807277 | 271 | 1.3 | 203 | 1.38 | 3.22 | 472 | 1.37E−03 |
| RS1905214 | 1902 | | | 6 | 6019201 | 187 | 1.29 | 285 | 1.36 | 3.22 | 470 | 1.37E−03 |
| RS10510809 | 274 | | | 3 | 59414093 | 386 | 1.32 | 78 | 1.42 | 3.22 | 462 | 1.37E−03 |
| RS661592 | 2040 | C7orf25 | 79020 | 7 | 42919011 | 428 | 1.35 | 34 | 1.21 | 3.22 | 460 | 1.37E−03 |
| RS1708370 | 1694 | TMEM108 | 66000 | 3 | 134499004 | 376 | 1.32 | 56 | 1.44 | 3.22 | 430 | 1.38E−03 |
| RS2198683 | 2513 | | | 18 | 56636476 | 196 | 1.29 | 262 | 1.37 | 3.21 | 456 | 1.42E−03 |
| RS989177 | 748 | | | 7 | 124200122 | 66 | 1.42 | 350 | 1.32 | 3.21 | 414 | 1.43E−03 |
| RS7664158 | 1792 | | | 4 | 117482746 | 406 | 1.32 | 74 | 1.42 | 3.2 | 478 | 1.47E−03 |
| RS1211435 | 2460 | | | 16 | 53138814 | 326 | 1.31 | 148 | 1.39 | 3.2 | 472 | 1.47E−03 |
| RS507575 | 1995 | TPD52L1 | 7164 | 6 | 125559665 | 424 | 1.32 | 42 | 1.45 | 3.2 | 464 | 1.47E−03 |
| RS7845961 | 2100 | | | 8 | 19783125 | 208 | 1.37 | 274 | 1.3 | 3.19 | 480 | 1.52E−03 |
| RS4692297 | 1713 | | | 4 | 27837884 | 266 | 1.37 | 214 | 1.29 | 3.19 | 478 | 1.52E−03 |
| RS3218493 | 2069 | XRCC2 | 7516 | 7 | 151984596 | 470 | 1.33 | 10 | 1.58 | 3.19 | 478 | 1.52E−03 |
| RS2294311 | 1457 | HSPC117 | 51493 | 22 | 31123269 | 357 | 1.31 | 121 | 1.39 | 3.19 | 476 | 1.52E−03 |
| RS6987277 | 766 | | | 8 | 8977241 | 436 | 1.32 | 38 | 1.46 | 3.19 | 472 | 1.52E−03 |
| RS7775656 | 1913 | TXNDC5 | 81567 | 6 | 7954759 | 388 | 1.35 | 76 | 1.25 | 3.19 | 462 | 1.52E−03 |
| RS918092 | 2306 | GRIN2B | 2904 | 12 | 13632070 | 372 | 1.31 | 86 | 1.4 | 3.19 | 456 | 1.52E−03 |
| RS1252225 | 854 | LOC138046 | 138046 | 8 | 85677664 | 284 | 1.31 | 98 | 1.4 | 3.19 | 380 | 1.54E−03 |
| RS10509173 | 2220 | | | 10 | 64281895 | 179 | 1.38 | 185 | 1.3 | 3.19 | 362 | 1.55E−03 |
| RS10514280 | 1854 | | | 5 | 85744155 | 455 | 1.34 | 23 | 1.17 | 3.18 | 476 | 1.57E−03 |
| RS1810113 | 2153 | TM7SF4 | 81501 | 8 | 105433770 | 323 | 1.31 | 155 | 1.39 | 3.18 | 476 | 1.57E−03 |
| RS1290030 | 2330 | | | 12 | 74498851 | 215 | 1.37 | 261 | 1.3 | 3.18 | 474 | 1.57E−03 |
| RS1861373 | 1150 | | | 12 | 96296999 | 204 | 1.29 | 272 | 1.37 | 3.18 | 474 | 1.57E−03 |
| RS9296009 | 1938 | | | 6 | 32222493 | 331 | 1.36 | 143 | 1.28 | 3.18 | 472 | 1.57E−03 |
| RS773013 | 2188 | | | 9 | 76973237 | 459 | 1.33 | 9 | 1.59 | 3.18 | 466 | 1.57E−03 |
| RS4703141 | 1855 | | | 5 | 97943067 | 289 | 1.3 | 141 | 1.38 | 3.18 | 428 | 1.58E−03 |
| RS1121922 | 2093 | PSD3 | 23362 | 8 | 18563312 | 432 | 1.32 | 50 | 1.44 | 3.17 | 480 | 1.62E−03 |
| RS10509698 | 1008 | C10orf130 | 387707 | 10 | 97782342 | 466 | 1.33 | 14 | 1.54 | 3.17 | 478 | 1.62E−03 |
| RS178462 | 2421 | | | 14 | 79520688 | 48 | 1.44 | 430 | 1.32 | 3.17 | 476 | 1.62E−03 |
| RS1046852 | 20 | C1orf139 | 79971 | 1 | 68363692 | 287 | 1.3 | 185 | 1.38 | 3.17 | 470 | 1.62E−03 |
| RS972432 | 2098 | PSD3 | 23362 | 8 | 18599317 | 444 | 1.32 | 28 | 1.46 | 3.17 | 470 | 1.62E−03 |
| RS2111368 | 2341 | | | 12 | 126098472 | 401 | 1.31 | 67 | 1.42 | 3.17 | 466 | 1.62E−03 |
| RS10503998 | 2113 | | | 8 | 37046107 | 410 | 1.32 | 46 | 1.44 | 3.17 | 454 | 1.63E−03 |
| RS1901439 | 204 | | | 2 | 134153941 | 425 | 1.32 | 55 | 1.43 | 3.16 | 478 | 1.68E−03 |
| RS6699989 | 44 | | | 1 | 87844970 | 75 | 1.42 | 399 | 1.32 | 3.16 | 472 | 1.68E−03 |
| RS10488861 | 1771 | | | 4 | 105845763 | 430 | 1.32 | 44 | 1.44 | 3.16 | 472 | 1.68E−03 |
| RS10504143 | 2121 | RB1CC1 | 9821 | 8 | 53714280 | 446 | 1.33 | 20 | 1.51 | 3.16 | 464 | 1.68E−03 |
| RS3874273 | 2434 | | | 15 | 34183438 | 290 | 1.31 | 172 | 1.38 | 3.16 | 460 | 1.68E−03 |
| RS10490347 | 1566 | FLJ10379 | 55133 | 2 | 45548444 | 434 | 1.34 | 48 | 1.23 | 3.15 | 480 | 1.73E−03 |
| RS10502475 | 1376 | KCTD1 | 284252 | 18 | 22427942 | 174 | 1.38 | 308 | 1.31 | 3.15 | 480 | 1.73E−03 |
| RS10517210 | 1716 | | | 4 | 30253178 | 423 | 1.32 | 57 | 1.43 | 3.15 | 478 | 1.74E−03 |
| RS10498944 | 1968 | | | 6 | 85414678 | 438 | 1.32 | 42 | 1.45 | 3.15 | 478 | 1.74E−03 |
| RS10483457 | 1232 | GARNL1 | 253959 | 14 | 35211683 | 447 | 1.32 | 33 | 1.47 | 3.15 | 478 | 1.74E−03 |
| RS10518178 | 1762 | | | 4 | 78638707 | 417 | 1.32 | 59 | 1.43 | 3.15 | 474 | 1.74E−03 |
| RS543465 | 1980 | ATG5 | 9474 | 6 | 106855297 | 438 | 1.33 | 38 | 1.46 | 3.15 | 474 | 1.74E−03 |
| RS10517562 | 436 | | | 4 | 153255193 | 160 | 1.28 | 314 | 1.36 | 3.15 | 472 | 1.74E−03 |
| RS8089476 | 1392 | | | 18 | 46107418 | 175 | 1.29 | 297 | 1.36 | 3.15 | 470 | 1.74E−03 |
| RS1473869 | 1699 | CCDC50 | 152137 | 3 | 192542016 | 446 | 1.34 | 24 | 1.18 | 3.15 | 468 | 1.74E−03 |
| RS10494722 | 1520 | | | 1 | 193329773 | 37 | 1.21 | 429 | 1.34 | 3.15 | 464 | 1.74E−03 |
| RS223128 | 1337 | | | 17 | 26933541 | 309 | 1.31 | 157 | 1.39 | 3.15 | 464 | 1.74E−03 |
| RS10486853 | 2058 | FLJ36166 | 349152 | 7 | 102642309 | 419 | 1.32 | 45 | 1.44 | 3.15 | 462 | 1.74E−03 |
| RS2353193 | 1607 | | | 2 | 170142309 | 393 | 1.32 | 87 | 1.41 | 3.14 | 478 | 1.79E−03 |
| RS6945746 | 2016 | SDK1 | 221935 | 7 | 3548845 | 411 | 1.32 | 65 | 1.42 | 3.14 | 474 | 1.79E−03 |
| RS10494716 | 1518 | | | 1 | 193182462 | 53 | 1.23 | 421 | 1.34 | 3.14 | 472 | 1.80E−03 |
| RS1025302 | 1875 | | | 5 | 120843420 | 384 | 1.31 | 90 | 1.41 | 3.14 | 472 | 1.80E−03 |
| RS2248815 | 1453 | ITSN1 | 6453 | 21 | 34060196 | 377 | 1.35 | 55 | 1.24 | 3.14 | 430 | 1.81E−03 |
| RS10493274 | 1481 | | | 1 | 60204577 | 414 | 1.32 | 16 | 1.52 | 3.14 | 428 | 1.81E−03 |
| RS10504433 | 824 | | | 8 | 70021434 | 430 | 1.32 | 52 | 1.43 | 3.13 | 480 | 1.85E−03 |
| RS7706518 | 576 | | | 5 | 127308921 | 432 | 1.32 | 48 | 1.44 | 3.13 | 478 | 1.86E−03 |
| RS10510271 | 1629 | | | 3 | 3546367 | 326 | 1.31 | 152 | 1.38 | 3.13 | 476 | 1.86E−03 |
| RS717357 | 1709 | | | 4 | 13994312 | 341 | 1.31 | 137 | 1.39 | 3.13 | 476 | 1.86E−03 |
| RS4673999 | 1612 | | | 2 | 216058272 | 222 | 1.29 | 252 | 1.36 | 3.13 | 472 | 1.86E−03 |
| RS1290939 | 2418 | RAD51L1 | 5890 | 14 | 67759566 | 399 | 1.32 | 55 | 1.43 | 3.13 | 452 | 1.86E−03 |
| RS2662258 | 1859 | RGMB | 285704 | 5 | 98153430 | 294 | 1.31 | 138 | 1.39 | 3.13 | 430 | 1.87E−03 |
| RS723981 | 1967 | SH3BGRL2 | 83699 | 6 | 80421994 | 420 | 1.32 | 6 | 1.65 | 3.13 | 424 | 1.87E−03 |
| RS10503344 | 2075 | | | 8 | 5804694 | 341 | 1.33 | 49 | 1.45 | 3.13 | 388 | 1.88E−03 |
| RS7701735 | 1853 | | | 5 | 85719306 | 457 | 1.34 | 25 | 1.18 | 3.12 | 480 | 1.92E−03 |
| RS958425 | 2204 | C10orf115 | 387642 | 10 | 23551932 | 418 | 1.32 | 62 | 1.43 | 3.12 | 478 | 1.92E−03 |
| RS1578975 | 1805 | | | 4 | 170533173 | 444 | 1.34 | 32 | 1.2 | 3.12 | 474 | 1.92E−03 |
| RS4631686 | 3 | | | 1 | 14450061 | 464 | 1.33 | 8 | 1.61 | 3.12 | 470 | 1.92E−03 |
| RS7798413 | 2039 | | | 7 | 40879048 | 398 | 1.31 | 72 | 1.41 | 3.12 | 468 | 1.92E−03 |
| RS10504166 | 2123 | LOC392222 | 392222 | 8 | 55556364 | 399 | 1.32 | 65 | 1.42 | 3.12 | 462 | 1.92E−03 |
| RS2409037 | 577 | | | 5 | 127314089 | 430 | 1.32 | 48 | 1.44 | 3.11 | 476 | 1.98E−03 |
| RS785039 | 1574 | | | 2 | 115087031 | 435 | 1.32 | 41 | 1.45 | 3.11 | 474 | 1.98E−03 |
| RS1314913 | 2419 | RAD51L1 | 5890 | 14 | 67769347 | 415 | 1.32 | 57 | 1.43 | 3.11 | 470 | 1.98E−03 |
| RS2769261 | 1504 | | | 1 | 113368430 | 340 | 1.32 | 80 | 1.42 | 3.11 | 418 | 2.00E−03 |
| RS10518896 | 2439 | C15orf41 | 84529 | 15 | 34731373 | 467 | 1.33 | 13 | 1.54 | 3.1 | 478 | 2.05E−03 |
| RS10510986 | 1655 | | | 3 | 69746452 | 430 | 1.32 | 48 | 1.44 | 3.1 | 476 | 2.05E−03 |
| RS7691071 | 1798 | | | 4 | 126835433 | 194 | 1.37 | 284 | 1.3 | 3.1 | 476 | 2.05E−03 |
| RS889053 | 1888 | | | 5 | 159028256 | 377 | 1.35 | 99 | 1.26 | 3.1 | 474 | 2.05E−03 |
| RS3218491 | 753 | XRCC2 | 7516 | 7 | 151984681 | 466 | 1.33 | 6 | 1.64 | 3.1 | 470 | 2.05E−03 |
| RS2034531 | 1799 | | | 4 | 137364060 | 23 | 1.49 | 447 | 1.33 | 3.1 | 468 | 2.05E−03 |
| RS1154307 | 550 | | | 5 | 111049411 | 409 | 1.33 | 41 | 1.45 | 3.1 | 448 | 2.06E−03 |
| RS10516627 | 1793 | | | 4 | 117487171 | 56 | 1.42 | 392 | 1.32 | 3.1 | 446 | 2.06E−03 |
| RS10487544 | 2068 | | | 7 | 143266616 | 284 | 1.35 | 164 | 1.28 | 3.1 | 446 | 2.06E−03 |
| RS1471531 | 2120 | | | 8 | 43226199 | 380 | 1.35 | 62 | 1.24 | 3.1 | 440 | 2.06E−03 |
| RS10494231 | 1505 | | | 1 | 120125842 | 220 | 1.29 | 184 | 1.37 | 3.1 | 402 | 2.07E−03 |
| RS1480145 | 796 | | | 8 | 16181494 | 470 | 1.33 | 12 | 1.55 | 3.09 | 480 | 2.12E−03 |
| RS370480 | 2353 | | | 13 | 55575987 | 154 | 1.38 | 328 | 1.31 | 3.09 | 480 | 2.12E−03 |
| RS10521210 | 1335 | | | 17 | 12966928 | 226 | 1.37 | 250 | 1.3 | 3.09 | 474 | 2.12E−03 |
| RS757668 | 744 | | | 7 | 122368820 | 180 | 1.38 | 292 | 1.31 | 3.09 | 470 | 2.12E−03 |
| RS2195875 | 2022 | | | 7 | 13707083 | 414 | 1.34 | 44 | 1.22 | 3.09 | 456 | 2.12E−03 |
| RS10508705 | 2205 | | | 10 | 26117594 | 413 | 1.32 | 43 | 1.44 | 3.09 | 454 | 2.12E−03 |
| RS10484171 | 2412 | | | 14 | 44213271 | 222 | 1.36 | 94 | 1.26 | 3.09 | 314 | 2.18E−03 |
| RS7002137 | 769 | | | 8 | 10653610 | 413 | 1.32 | 69 | 1.42 | 3.08 | 480 | 2.19E−03 |
| RS10491068 | 1011 | BLNK | 29760 | 10 | 97946892 | 467 | 1.33 | 15 | 1.53 | 3.08 | 480 | 2.19E−03 |
| RS10514614 | 2464 | | | 16 | 84837699 | 442 | 1.32 | 36 | 1.46 | 3.08 | 476 | 2.19E−03 |
| RS1110581 | 1568 | | | 2 | 66930615 | 401 | 1.32 | 75 | 1.41 | 3.08 | 474 | 2.19E−03 |
| RS998359 | 1777 | NDST4 | 64579 | 4 | 116090480 | 345 | 1.31 | 131 | 1.39 | 3.08 | 474 | 2.19E−03 |
| RS1889465 | 1985 | SLC35F1 | 222553 | 6 | 118649503 | 444 | 1.32 | 32 | 1.47 | 3.08 | 474 | 2.19E−03 |
| RS2448361 | 2219 | CDC2 | 983 | 10 | 62223133 | 402 | 1.32 | 72 | 1.42 | 3.08 | 472 | 2.19E−03 |
| RS2123769 | 1557 | LTBP1 | 4052 | 2 | 33378911 | 313 | 1.35 | 155 | 1.28 | 3.08 | 466 | 2.19E−03 |
| RS183628 | 1856 | | | 5 | 98007391 | 325 | 1.31 | 143 | 1.39 | 3.08 | 466 | 2.19E−03 |
| RS2485488 | 2345 | | | 13 | 37441039 | 101 | 1.26 | 365 | 1.35 | 3.08 | 464 | 2.19E−03 |
| RS10486529 | 2034 | PTHB1 | 27241 | 7 | 33363277 | 385 | 1.35 | 75 | 1.25 | 3.08 | 458 | 2.19E−03 |
| RS6837953 | 437 | | | 4 | 154150413 | 415 | 1.32 | 35 | 1.45 | 3.08 | 448 | 2.20E−03 |
| RS3749216 | 1650 | FAM19A1 | 407738 | 3 | 68548925 | 478 | 1.33 | 4 | 1.71 | 3.07 | 480 | 2.26E−03 |
| RS1883736 | 2248 | ABTB2 | 25841 | 11 | 34330019 | 466 | 1.33 | 14 | 1.53 | 3.07 | 478 | 2.26E−03 |
| RS2167871 | 2044 | | | 7 | 61715567 | 427 | 1.32 | 51 | 1.43 | 3.07 | 476 | 2.26E−03 |
| RS10505768 | 1112 | | | 12 | 12790297 | 107 | 1.27 | 371 | 1.35 | 3.07 | 476 | 2.26E−03 |
| RS1433450 | 1293 | | | 15 | 85342066 | 433 | 1.34 | 45 | 1.23 | 3.07 | 476 | 2.26E−03 |
| RS1979980 | 1858 | RGMB | 285704 | 5 | 98134967 | 339 | 1.31 | 135 | 1.39 | 3.07 | 472 | 2.26E−03 |
| RS6955211 | 2050 | | | 7 | 63509775 | 175 | 1.38 | 291 | 1.31 | 3.07 | 464 | 2.27E−03 |
| RS7765062 | 2012 | | | 6 | 153316119 | 26 | 1.19 | 436 | 1.34 | 3.07 | 460 | 2.27E−03 |
| RS10226709 | 708 | DGKB | 1607 | 7 | 14764159 | 364 | 1.35 | 68 | 1.25 | 3.07 | 430 | 2.28E−03 |
| RS745708 | 976 | FRMPD2 | 143162 | 10 | 49115681 | 351 | 1.31 | 75 | 1.41 | 3.07 | 424 | 2.28E−03 |
| RS2138537 | 1701 | | | 3 | 193034173 | 221 | 1.37 | 261 | 1.3 | 3.06 | 480 | 2.34E−03 |
| RS10500720 | 2237 | SBF2 | 81846 | 11 | 10159532 | 467 | 1.34 | 15 | 1.14 | 3.06 | 480 | 2.34E−03 |
| RS10500723 | 2238 | SBF2 | 81846 | 11 | 10212811 | 467 | 1.34 | 15 | 1.14 | 3.06 | 480 | 2.34E−03 |
| RS10497472 | 1609 | | | 2 | 177492847 | 450 | 1.33 | 30 | 1.47 | 3.06 | 478 | 2.34E−03 |
| RS9325124 | 1887 | | | 5 | 148229011 | 296 | 1.31 | 184 | 1.38 | 3.06 | 478 | 2.34E−03 |
| RS3823290 | 1982 | FLJ10159 | 55084 | 6 | 108026930 | 438 | 1.32 | 42 | 1.45 | 3.06 | 478 | 2.34E−03 |
| RS10509759 | 2226 | CNNM2 | 54805 | 10 | 104679655 | 453 | 1.32 | 27 | 1.48 | 3.06 | 478 | 2.34E−03 |
| RS10514844 | 1182 | | | 13 | 37808480 | 471 | 1.33 | 7 | 1.62 | 3.06 | 476 | 2.34E−03 |
| RS346421 | 527 | | | 5 | 62565739 | 429 | 1.32 | 47 | 1.44 | 3.06 | 474 | 2.34E−03 |
| RS7339969 | 1516 | C1orf27 | 54953 | 1 | 184648393 | 156 | 1.39 | 318 | 1.31 | 3.06 | 472 | 2.34E−03 |
| RS6427753 | 1524 | | | 1 | 197069037 | 322 | 1.31 | 152 | 1.38 | 3.06 | 472 | 2.34E−03 |
| RS10510987 | 1656 | | | 3 | 69785447 | 430 | 1.32 | 42 | 1.44 | 3.06 | 470 | 2.34E−03 |
| RS10518211 | 365 | | | 4 | 80156089 | 253 | 1.36 | 219 | 1.29 | 3.06 | 470 | 2.34E−03 |
| RS2163721 | 2333 | PPFIA2 | 8499 | 12 | 80343092 | 463 | 1.34 | 9 | 1.09 | 3.06 | 470 | 2.34E−03 |
| RS10486530 | 2035 | PTHB1 | 27241 | 7 | 33364558 | 385 | 1.35 | 77 | 1.25 | 3.06 | 460 | 2.34E−03 |
| RS10501990 | 2290 | | | 11 | 101172368 | 290 | 1.31 | 140 | 1.39 | 3.06 | 428 | 2.35E−03 |
| RS1465135 | 697 | | | 6 | 164115617 | 314 | 1.3 | 114 | 1.38 | 3.06 | 426 | 2.35E−03 |
| RS1905015 | 1668 | | | 3 | 100210226 | 180 | 1.38 | 298 | 1.31 | 3.05 | 476 | 2.42E−03 |
| RS947271 | 1507 | REG4 | 83998 | 1 | 120138926 | 258 | 1.3 | 218 | 1.37 | 3.05 | 474 | 2.42E−03 |
| RS10484926 | 2006 | | | 6 | 146336371 | 470 | 1.33 | 4 | 1.71 | 3.05 | 472 | 2.42E−03 |
| RS1805781 | 1111 | PHC1 | 1911 | 12 | 8957155 | 468 | 1.33 | 6 | 1.64 | 3.05 | 472 | 2.42E−03 |
| RS7234279 | 2509 | | | 18 | 55200765 | 428 | 1.34 | 46 | 1.23 | 3.05 | 472 | 2.42E−03 |
| RS6895637 | 1821 | ADAMTS12 | 81792 | 5 | 33785569 | 319 | 1.35 | 141 | 1.28 | 3.05 | 458 | 2.42E−03 |
| RS10499134 | 2000 | | | 6 | 126479722 | 426 | 1.34 | 30 | 1.2 | 3.05 | 454 | 2.42E−03 |
| RS2785949 | 1195 | | | 13 | 53806676 | 316 | 1.31 | 138 | 1.39 | 3.05 | 452 | 2.42E−03 |
| RS26207 | 1877 | ADAMTS19 | 171019 | 5 | 129063995 | 260 | 1.36 | 138 | 1.28 | 3.05 | 396 | 2.44E−03 |
| RS10510104 | 1030 | ATE1 | 11101 | 10 | 123521812 | 394 | 1.32 | 88 | 1.41 | 3.04 | 480 | 2.50E−03 |
| RS10500719 | 2236 | SBF2 | 81846 | 11 | 10146418 | 465 | 1.34 | 15 | 1.14 | 3.04 | 478 | 2.50E−03 |
| RS260933 | 1715 | | | 4 | 28982993 | 261 | 1.36 | 215 | 1.29 | 3.04 | 474 | 2.50E−03 |
| RS7447076 | 1872 | | | 5 | 100585396 | 134 | 1.28 | 342 | 1.36 | 3.04 | 474 | 2.50E−03 |
| RS6079097 | 2542 | TASP1 | 55617 | 20 | 13474577 | 139 | 1.38 | 337 | 1.31 | 3.04 | 474 | 2.50E−03 |
| RS6601146 | 1899 | LOC646210 | 646210 | 5 | 180226111 | 127 | 1.28 | 345 | 1.35 | 3.04 | 470 | 2.50E−03 |
| RS9307159 | 1770 | UNC5C | 8633 | 4 | 96560909 | 391 | 1.35 | 79 | 1.26 | 3.04 | 468 | 2.50E−03 |
| RS2527729 | 2074 | | | 8 | 5376923 | 130 | 1.27 | 334 | 1.35 | 3.04 | 462 | 2.50E−03 |
| RS1268444 | 1937 | | | 6 | 30519525 | 277 | 1.31 | 157 | 1.38 | 3.04 | 432 | 2.51E−03 |
| RS7573989 | 1569 | | | 2 | 66974299 | 414 | 1.32 | 68 | 1.42 | 3.03 | 480 | 2.58E−03 |
| RS10509705 | 1010 | | | 10 | 97914784 | 468 | 1.33 | 14 | 1.53 | 3.03 | 480 | 2.58E−03 |
| RS1079634 | 2462 | WWOX | 51741 | 16 | 77468635 | 363 | 1.31 | 119 | 1.39 | 3.03 | 480 | 2.58E−03 |
| RS10494583 | 1514 | TPR | 7175 | 1 | 184557118 | 385 | 1.32 | 95 | 1.4 | 3.03 | 478 | 2.58E−03 |
| RS2291385 | 2014 | SYTL3 | 94120 | 6 | 159104665 | 455 | 1.32 | 25 | 1.48 | 3.03 | 478 | 2.58E−03 |
| RS2743562 | 1978 | ATG5 | 9474 | 6 | 106799841 | 437 | 1.32 | 37 | 1.45 | 3.03 | 472 | 2.58E−03 |
| RS2043835 | 1874 | | | 5 | 111010485 | 434 | 1.32 | 48 | 1.44 | 3.02 | 480 | 2.66E−03 |
| RS4504494 | 2001 | ARHGAP18 | 93663 | 6 | 129954780 | 469 | 1.33 | 13 | 1.54 | 3.02 | 480 | 2.66E−03 |
| RS6949530 | 2062 | | | 7 | 122406461 | 411 | 1.32 | 71 | 1.42 | 3.02 | 480 | 2.66E−03 |
| RS10512000 | 2186 | | | 9 | 73345993 | 37 | 1.22 | 445 | 1.34 | 3.02 | 480 | 2.66E−03 |
| RS10492135 | 1114 | GRIN2B | 2904 | 12 | 13777535 | 105 | 1.4 | 375 | 1.31 | 3.02 | 478 | 2.66E−03 |
| RS1443120 | 2296 | | | 11 | 109749438 | 441 | 1.32 | 37 | 1.45 | 3.02 | 476 | 2.66E−03 |
| RS854404 | 2373 | | | 14 | 24273746 | 309 | 1.31 | 169 | 1.38 | 3.02 | 476 | 2.66E−03 |
| RS2825681 | 2562 | | | 21 | 19910552 | 415 | 1.32 | 61 | 1.43 | 3.02 | 474 | 2.66E−03 |
| RS10493409 | 1483 | SGIP1 | 84251 | 1 | 66778534 | 408 | 1.32 | 64 | 1.42 | 3.02 | 470 | 2.67E−03 |
| RS9306281 | 2573 | LARGE | 9215 | 22 | 32343807 | 127 | 1.39 | 343 | 1.31 | 3.02 | 468 | 2.67E−03 |
| RS10484230 | 1236 | | | 14 | 43700947 | 365 | 1.31 | 101 | 1.4 | 3.02 | 464 | 2.67E−03 |
| RS1993306 | 1555 | LTBP1 | 4052 | 2 | 33299839 | 361 | 1.35 | 99 | 1.26 | 3.02 | 458 | 2.67E−03 |
| RS7752672 | 1999 | | | 6 | 125629122 | 185 | 1.38 | 273 | 1.31 | 3.02 | 456 | 2.67E−03 |
| RS547595 | 1503 | SLC25A24 | 29957 | 1 | 108527709 | 173 | 1.29 | 277 | 1.36 | 3.02 | 448 | 2.67E−03 |
| RS1526595 | 1648 | CACNA2D3 | 55799 | 3 | 54903536 | 320 | 1.31 | 126 | 1.39 | 3.02 | 444 | 2.67E−03 |
| RS2458349 | 1105 | | | 11 | 105805096 | 204 | 1.38 | 240 | 1.31 | 3.02 | 442 | 2.67E−03 |
| RS2405708 | 428 | | | 4 | 137201172 | 161 | 1.38 | 223 | 1.3 | 3.02 | 382 | 2.70E−03 |
| RS9285429 | 1988 | | | 6 | 118811259 | 307 | 1.36 | 175 | 1.29 | 3.01 | 480 | 2.75E−03 |
| RS1324088 | 628 | | | 6 | 25949101 | 444 | 1.32 | 36 | 1.45 | 3.01 | 478 | 2.75E−03 |
| RS1914542 | 2233 | | | 10 | 125651321 | 174 | 1.38 | 306 | 1.31 | 3.01 | 478 | 2.75E−03 |
| RS1945627 | 2245 | LOC387755 | 387755 | 11 | 15182763 | 453 | 1.32 | 27 | 1.47 | 3.01 | 478 | 2.75E−03 |
| RS10503572 | 789 | | | 8 | 16131101 | 473 | 1.33 | 5 | 1.67 | 3.01 | 476 | 2.75E−03 |
| RS539111 | 1961 | BAI3 | 577 | 6 | 69638536 | 269 | 1.36 | 207 | 1.3 | 3.01 | 474 | 2.75E−03 |
| RS717997 | 2334 | | | 12 | 82658105 | 292 | 1.31 | 178 | 1.38 | 3.01 | 468 | 2.75E−03 |
| RS787433 | 1590 | | | 2 | 145580328 | 260 | 1.31 | 200 | 1.38 | 3.01 | 458 | 2.76E−03 |
| RS2124726 | 1549 | FMN2 | 56776 | 1 | 238431700 | 301 | 1.36 | 157 | 1.29 | 3.01 | 456 | 2.76E−03 |
| RS10514136 | 1849 | AP3B1 | 8546 | 5 | 77467642 | 376 | 1.34 | 48 | 1.23 | 3.01 | 422 | 2.77E−03 |
| RS2470549 | 1635 | ANKRD28 | 23243 | 3 | 15712702 | 206 | 1.34 | 134 | 1.27 | 3.01 | 338 | 2.81E−03 |
| RS2591651 | 1826 | PDE4D | 5144 | 5 | 58615479 | 477 | 1.33 | 5 | 1.66 | 3 | 480 | 2.84E−03 |
| RS10519569 | 2430 | LOC653227 | 653227 | 15 | 24902890 | 412 | 1.32 | 70 | 1.42 | 3 | 480 | 2.84E−03 |
| RS10519571 | 2429 | LOC653227 | 653227 | 15 | 24899931 | 409 | 1.32 | 71 | 1.41 | 3 | 478 | 2.84E−03 |
| RS10495466 | 118 | FMN2 | 56776 | 1 | 238575190 | 458 | 1.33 | 20 | 1.5 | 3 | 476 | 2.84E−03 |
| RS7688920 | 1800 | | | 4 | 146812432 | 447 | 1.34 | 31 | 1.2 | 3 | 476 | 2.84E−03 |
| RS3924594 | 2329 | CAPS2 | 84698 | 12 | 73969063 | 190 | 1.37 | 284 | 1.3 | 3 | 472 | 2.84E−03 |
| RS2817738 | 1927 | | | 6 | 24899079 | 51 | 1.44 | 411 | 1.32 | 3 | 460 | 2.85E−03 |
| RS726789 | 2532 | EMR3 | 84658 | 19 | 14604003 | 292 | 1.36 | 170 | 1.28 | 3 | 460 | 2.85E−03 |
| RS6601438 | 2084 | MSRA | 4482 | 8 | 10217077 | 385 | 1.32 | 73 | 1.41 | 3 | 456 | 2.85E−03 |
| RS2301448 | 2574 | | | 22 | 44417456 | 144 | 1.39 | 274 | 1.31 | 3 | 416 | 2.86E−03 |
| RS9323682 | 2422 | | | 14 | 79536316 | 436 | 1.32 | 40 | 1.45 | 2.99 | 474 | 2.93E−03 |
| RS8099275 | 2511 | | | 18 | 56551281 | 214 | 1.3 | 262 | 1.36 | 2.99 | 474 | 2.93E−03 |
| RS4695371 | 1736 | | | 4 | 48018575 | 408 | 1.31 | 62 | 1.41 | 2.99 | 468 | 2.94E−03 |
| RS10515792 | 1889 | | | 5 | 159028460 | 369 | 1.35 | 101 | 1.27 | 2.99 | 468 | 2.94E−03 |
| RS1604613 | 1197 | | | 13 | 69021604 | 210 | 1.37 | 246 | 1.3 | 2.99 | 454 | 2.94E−03 |
| RS1579274 | 2119 | | | 8 | 41778080 | 349 | 1.31 | 129 | 1.39 | 2.98 | 476 | 3.03E−03 |
| RS10506626 | 1128 | TSPAN8 | 7103 | 12 | 69815758 | 328 | 1.31 | 148 | 1.39 | 2.98 | 474 | 3.03E−03 |
| RS779320 | 1702 | | | 3 | 193065627 | 333 | 1.35 | 141 | 1.28 | 2.98 | 472 | 3.03E−03 |
| RS1063964 | 2053 | SRI | 6717 | 7 | 87673405 | 307 | 1.36 | 167 | 1.29 | 2.98 | 472 | 3.03E−03 |
| RS10516028 | 1892 | | | 5 | 165975170 | 58 | 1.24 | 414 | 1.35 | 2.98 | 470 | 3.03E−03 |
| RS4146127 | 350 | | | 4 | 59114124 | 392 | 1.32 | 78 | 1.41 | 2.98 | 468 | 3.03E−03 |
| RS7678343 | 1801 | | | 4 | 161555665 | 91 | 1.4 | 379 | 1.32 | 2.98 | 468 | 3.03E−03 |
| RS32967 | 1852 | | | 5 | 80214012 | 118 | 1.27 | 352 | 1.35 | 2.98 | 468 | 3.03E−03 |
| RS2292250 | 1634 | SRGAP3 | 9901 | 3 | 9064178 | 445 | 1.33 | 19 | 1.5 | 2.98 | 462 | 3.03E−03 |
| RS10495787 | 1561 | LTBP1 | 4052 | 2 | 33453813 | 114 | 1.39 | 348 | 1.31 | 2.98 | 460 | 3.04E−03 |
| RS1527420 | 196 | | | 2 | 119267761 | 395 | 1.32 | 53 | 1.43 | 2.98 | 446 | 3.04E−03 |
| RS1372184 | 2227 | | | 10 | 109230619 | 365 | 1.32 | 79 | 1.41 | 2.98 | 442 | 3.04E−03 |
| RS490680 | 1501 | SLC25A24 | 29957 | 1 | 108526041 | 188 | 1.29 | 292 | 1.36 | 2.97 | 478 | 3.13E−03 |
| RS2825652 | 1441 | | | 21 | 19865219 | 470 | 1.33 | 10 | 1.56 | 2.97 | 478 | 3.13E−03 |
| RS579588 | 1963 | BAI3 | 577 | 6 | 69639537 | 270 | 1.36 | 208 | 1.29 | 2.97 | 476 | 3.13E−03 |
| RS10510175 | 1631 | | | 3 | 3747717 | 417 | 1.32 | 55 | 1.42 | 2.97 | 470 | 3.13E−03 |
| RS566537 | 1962 | BAI3 | 577 | 6 | 69639246 | 266 | 1.36 | 206 | 1.3 | 2.97 | 470 | 3.13E−03 |
| RS2608030 | 2163 | | | 8 | 129234261 | 373 | 1.32 | 99 | 1.4 | 2.97 | 470 | 3.13E−03 |
| RS9287674 | 1552 | | | 2 | 6411955 | 313 | 1.36 | 153 | 1.28 | 2.97 | 464 | 3.13E−03 |
| RS491785 | 1502 | SLC25A24 | 29957 | 1 | 108526216 | 180 | 1.29 | 284 | 1.36 | 2.97 | 462 | 3.13E−03 |
| RS6077461 | 2539 | | | 20 | 8888587 | 192 | 1.38 | 250 | 1.31 | 2.97 | 440 | 3.14E−03 |
| RS333856 | 1576 | | | 2 | 117692216 | 475 | 1.33 | 7 | 1.61 | 2.96 | 480 | 3.23E−03 |
| RS279511 | 1781 | NDST4 | 64579 | 4 | 116125572 | 343 | 1.31 | 139 | 1.39 | 2.96 | 480 | 3.23E−03 |
| RS285406 | 855 | | | 8 | 87094129 | 460 | 1.33 | 22 | 1.49 | 2.96 | 480 | 3.23E−03 |
| RS9314803 | 2187 | | | 9 | 75072811 | 455 | 1.32 | 27 | 1.47 | 2.96 | 480 | 3.23E−03 |
| RS6544711 | 1565 | DYNC2LI1 | 51626 | 2 | 43853999 | 335 | 1.36 | 145 | 1.28 | 2.96 | 478 | 3.23E−03 |
| RS1480974 | 1719 | | | 4 | 34852928 | 146 | 1.28 | 334 | 1.36 | 2.96 | 478 | 3.23E−03 |
| RS245340 | 1851 | MSH3 | 4437 | 5 | 80197256 | 124 | 1.28 | 356 | 1.35 | 2.96 | 478 | 3.23E−03 |
| RS4509682 | 2216 | C10orf72 | 196740 | 10 | 49983627 | 136 | 1.39 | 342 | 1.31 | 2.96 | 476 | 3.23E−03 |
| RS3951463 | 2305 | | | 12 | 5284520 | 118 | 1.39 | 360 | 1.31 | 2.96 | 476 | 3.23E−03 |
| RS2133675 | 2321 | | | 12 | 33086481 | 435 | 1.34 | 41 | 1.22 | 2.96 | 474 | 3.23E−03 |
| RS10483512 | 2402 | | | 14 | 39587177 | 264 | 1.31 | 208 | 1.38 | 2.96 | 470 | 3.23E−03 |
| RS1506575 | 2366 | | | 13 | 70452523 | 392 | 1.32 | 76 | 1.41 | 2.96 | 466 | 3.23E−03 |
| RS540970 | 1377 | KCTD1 | 284252 | 18 | 22430481 | 161 | 1.37 | 303 | 1.3 | 2.96 | 462 | 3.23E−03 |
| RS4723970 | 2038 | C7orf10 | 79783 | 7 | 40542997 | 410 | 1.35 | 52 | 1.24 | 2.96 | 460 | 3.24E−03 |
| RS935056 | 1506 | | | 1 | 120134921 | 250 | 1.3 | 210 | 1.37 | 2.96 | 458 | 3.24E−03 |
| RS10517293 | 1737 | | | 4 | 54284572 | 426 | 1.32 | 30 | 1.46 | 2.96 | 454 | 3.24E−03 |
| RS6937642 | 1989 | | | 6 | 118812481 | 162 | 1.29 | 292 | 1.36 | 2.96 | 452 | 3.24E−03 |
| RS1404838 | 2063 | | | 7 | 122483459 | 167 | 1.38 | 287 | 1.31 | 2.96 | 452 | 3.24E−03 |
| RS339906 | 2481 | RAC1P1 | 387612 | 18 | 20521263 | 307 | 1.3 | 143 | 1.37 | 2.96 | 448 | 3.24E−03 |
| RS243965 | 399 | | | 4 | 111509327 | 313 | 1.36 | 133 | 1.28 | 2.96 | 444 | 3.24E−03 |
| RS2131774 | 1468 | CSMD2 | 114784 | 1 | 33841310 | 69 | 1.26 | 303 | 1.36 | 2.96 | 370 | 3.27E−03 |
| RS10493351 | 1482 | | | 1 | 63946731 | 472 | 1.33 | 10 | 1.56 | 2.95 | 480 | 3.33E−03 |
| RS2971828 | 1567 | | | 2 | 66408091 | 386 | 1.32 | 94 | 1.4 | 2.95 | 478 | 3.33E−03 |
| RS978876 | 2263 | | | 11 | 91525144 | 406 | 1.35 | 72 | 1.25 | 2.95 | 476 | 3.33E−03 |
| RS9317885 | 2365 | | | 13 | 69628755 | 226 | 1.3 | 252 | 1.36 | 2.95 | 476 | 3.33E−03 |
| RS8004187 | 2400 | PAX9 | 5083 | 14 | 36210255 | 256 | 1.36 | 220 | 1.3 | 2.95 | 474 | 3.33E−03 |
| RS4866602 | 1807 | | | 5 | 3742363 | 387 | 1.35 | 77 | 1.26 | 2.95 | 462 | 3.34E−03 |
| RS1526813 | 2326 | | | 12 | 73643812 | 175 | 1.37 | 259 | 1.3 | 2.95 | 432 | 3.35E−03 |
| RS2288338 | 369 | HNRPD | 3184 | 4 | 83493658 | 324 | 1.36 | 108 | 1.28 | 2.95 | 430 | 3.35E−03 |
| RS2222654 | 430 | | | 4 | 137225511 | 190 | 1.38 | 236 | 1.31 | 2.95 | 424 | 3.35E−03 |
| RS10510248 | 1625 | CNTN4 | 152330 | 3 | 3023519 | 281 | 1.3 | 139 | 1.37 | 2.95 | 418 | 3.36E−03 |
| RS7009724 | 2078 | | | 8 | 8976535 | 233 | 1.3 | 185 | 1.37 | 2.95 | 416 | 3.36E−03 |
| RS10515526 | 1886 | | | 5 | 143157421 | 475 | 1.33 | 7 | 1.61 | 2.94 | 480 | 3.44E−03 |
| RS6954168 | 755 | LOC653748 | 653748 | 7 | 153727085 | 473 | 1.33 | 7 | 1.6 | 2.94 | 478 | 3.44E−03 |
| RS10513319 | 952 | | | 9 | 119741270 | 464 | 1.33 | 16 | 1.51 | 2.94 | 478 | 3.44E−03 |
| RS7148403 | 1234 | | | 14 | 38248309 | 426 | 1.32 | 52 | 1.43 | 2.94 | 476 | 3.44E−03 |
| RS1948617 | 2516 | | | 18 | 56819944 | 199 | 1.29 | 277 | 1.36 | 2.94 | 474 | 3.44E−03 |
| RS10485441 | 2557 | BCAS1 | 8537 | 20 | 51997775 | 44 | 1.44 | 432 | 1.32 | 2.94 | 474 | 3.44E−03 |
| RS10484317 | 604 | FARS2 | 10667 | 6 | 5614669 | 452 | 1.32 | 22 | 1.48 | 2.94 | 472 | 3.44E−03 |
| RS1219739 | 2232 | CPXM2 | 119587 | 10 | 125515459 | 460 | 1.34 | 14 | 1.14 | 2.94 | 472 | 3.44E−03 |
| RS168142 | 2482 | | | 18 | 20523065 | 321 | 1.3 | 153 | 1.38 | 2.94 | 472 | 3.44E−03 |
| RS6798797 | 271 | | | 3 | 40741966 | 18 | 1.5 | 454 | 1.32 | 2.94 | 470 | 3.44E−03 |
| RS868691 | 971 | | | 10 | 25945882 | 434 | 1.32 | 32 | 1.46 | 2.94 | 464 | 3.45E−03 |
| RS10499231 | 2004 | UTRN | 7402 | 6 | 144903639 | 307 | 1.31 | 155 | 1.38 | 2.94 | 460 | 3.45E−03 |
| RS10489168 | 1476 | PRNPIP | 79033 | 1 | 44500588 | 441 | 1.32 | 19 | 1.49 | 2.94 | 458 | 3.45E−03 |
| RS2832298 | 2565 | C21orf41 | 54073 | 21 | 29665734 | 283 | 1.36 | 173 | 1.29 | 2.94 | 454 | 3.45E−03 |
| RS10521202 | 2470 | KIAA0672 | 9912 | 17 | 12755289 | 234 | 1.3 | 198 | 1.37 | 2.94 | 430 | 3.46E−03 |
| RS10508244 | 2200 | PFKP | 5214 | 10 | 3143203 | 454 | 1.32 | 28 | 1.47 | 2.93 | 480 | 3.55E−03 |
| RS1441638 | 1778 | NDST4 | 64579 | 4 | 116094415 | 363 | 1.31 | 117 | 1.39 | 2.93 | 478 | 3.55E−03 |
| RS2529588 | 2061 | IFRD1 | 3475 | 7 | 111890291 | 152 | 1.28 | 324 | 1.35 | 2.93 | 474 | 3.55E−03 |
| RS763836 | 1553 | ALK | 238 | 2 | 29758808 | 100 | 1.4 | 372 | 1.31 | 2.93 | 470 | 3.55E−03 |
| RS10499432 | 2019 | | | 7 | 13646983 | 228 | 1.3 | 244 | 1.36 | 2.93 | 470 | 3.55E−03 |
| RS6807699 | 1689 | LOC389142 | 389142 | 3 | 119736159 | 126 | 1.28 | 342 | 1.35 | 2.93 | 466 | 3.56E−03 |
| RS285866 | 2154 | | | 8 | 106132633 | 301 | 1.36 | 133 | 1.28 | 2.93 | 432 | 3.57E−03 |
| RS581277 | 2247 | MPPED2 | 744 | 11 | 30436710 | 421 | 1.32 | 59 | 1.42 | 2.92 | 478 | 3.67E−03 |
| RS10518660 | 1492 | LPHN2 | 23266 | 1 | 82154655 | 449 | 1.32 | 29 | 1.46 | 2.92 | 476 | 3.67E−03 |
| RS4970642 | 1498 | | | 1 | 82238319 | 426 | 1.32 | 52 | 1.43 | 2.92 | 476 | 3.67E−03 |
| RS10495058 | 1529 | GPATC2 | 55105 | 1 | 215697001 | 461 | 1.33 | 7 | 1.61 | 2.92 | 466 | 3.67E−03 |
| RS9299445 | 993 | LOC644954 | 644954 | 10 | 63244794 | 431 | 1.32 | 37 | 1.44 | 2.92 | 466 | 3.67E−03 |
| RS3844148 | 1981 | | | 6 | 106923377 | 164 | 1.29 | 302 | 1.36 | 2.92 | 464 | 3.67E−03 |
| RS4714203 | 1942 | DNAH8 | 1769 | 6 | 39048774 | 401 | 1.33 | 53 | 1.43 | 2.92 | 452 | 3.68E−03 |
| RS2200038 | 2447 | | | 15 | 37262421 | 207 | 1.37 | 247 | 1.3 | 2.92 | 452 | 3.68E−03 |
| RS744319 | 2448 | | | 15 | 55668992 | 315 | 1.31 | 109 | 1.4 | 2.92 | 422 | 3.69E−03 |
| RS722708 | 1363 | SPIRE1 | 56907 | 18 | 12535581 | 175 | 1.37 | 203 | 1.29 | 2.92 | 376 | 3.71E−03 |
| RS3904322 | 2343 | LOC646184 | 646184 | 13 | 22266506 | 290 | 1.34 | 86 | 1.25 | 2.92 | 374 | 3.71E−03 |
| RS514644 | 2246 | MPPED2 | 744 | 11 | 30408757 | 423 | 1.32 | 59 | 1.42 | 2.91 | 480 | 3.78E−03 |
| RS4901706 | 2414 | C14orf101 | 54916 | 14 | 56184138 | 421 | 1.32 | 59 | 1.42 | 2.91 | 478 | 3.78E−03 |
| RS10518442 | 1797 | ANKRD50 | 57182 | 4 | 125813718 | 110 | 1.39 | 366 | 1.32 | 2.91 | 474 | 3.78E−03 |
| RS2825672 | 2560 | | | 21 | 19887865 | 386 | 1.32 | 90 | 1.4 | 2.91 | 474 | 3.78E−03 |
| RS7718000 | 551 | | | 5 | 112998258 | 469 | 1.33 | 5 | 1.65 | 2.91 | 472 | 3.79E−03 |
| RS3924016 | 2002 | | | 6 | 139665701 | 328 | 1.31 | 146 | 1.38 | 2.91 | 472 | 3.79E−03 |
| RS4131953 | 2325 | | | 12 | 73597990 | 291 | 1.31 | 181 | 1.38 | 2.91 | 470 | 3.79E−03 |
| RS622345 | 1467 | | | 1 | 24513043 | 371 | 1.33 | 67 | 1.42 | 2.91 | 436 | 3.80E−03 |
| RS10500985 | 1052 | LUZP2 | 338645 | 11 | 24590527 | 83 | 1.4 | 353 | 1.31 | 2.91 | 434 | 3.80E−03 |
| RS578499 | 1958 | | | 6 | 54509226 | 316 | 1.36 | 166 | 1.29 | 2.9 | 480 | 3.90E−03 |
| RS173036 | 2449 | | | 15 | 58145519 | 472 | 1.33 | 10 | 1.56 | 2.9 | 480 | 3.90E−03 |
| RS737769 | 2569 | RUTBC2 | 129049 | 22 | 23605393 | 37 | 1.45 | 445 | 1.32 | 2.9 | 480 | 3.90E−03 |
| RS953177 | 823 | DNAJC5B | 85479 | 8 | 67096174 | 452 | 1.33 | 26 | 1.47 | 2.9 | 476 | 3.90E−03 |
| RS966430 | 1817 | | | 5 | 13736184 | 242 | 1.36 | 232 | 1.3 | 2.9 | 472 | 3.91E−03 |
| RS6838661 | 1763 | FRAS1 | 80144 | 4 | 79296422 | 112 | 1.27 | 360 | 1.35 | 2.9 | 470 | 3.91E−03 |
| RS10487729 | 2030 | LOC223075 | 223075 | 7 | 31538809 | 383 | 1.32 | 89 | 1.4 | 2.9 | 470 | 3.91E−03 |
| RS250388 | 519 | ARL15 | 54622 | 5 | 53621019 | 409 | 1.32 | 61 | 1.42 | 2.9 | 468 | 3.91E−03 |
| RS10510444 | 1636 | | | 3 | 15985480 | 250 | 1.31 | 218 | 1.37 | 2.9 | 466 | 3.91E−03 |
| RS10513765 | 316 | PEX5L | 51555 | 3 | 181027564 | 171 | 1.38 | 295 | 1.31 | 2.9 | 464 | 3.91E−03 |
| RS10508204 | 2199 | C10orf110 | 55853 | 10 | 1074360 | 228 | 1.3 | 238 | 1.37 | 2.9 | 464 | 3.91E−03 |
| RS7556543 | 1512 | PRG4 | 10216 | 1 | 184537042 | 81 | 1.41 | 375 | 1.32 | 2.9 | 454 | 3.91E−03 |
| RS2304376 | 727 | GBAS | 2631 | 7 | 56016513 | 376 | 1.35 | 76 | 1.26 | 2.9 | 450 | 3.91E−03 |
| RS2832296 | 2564 | C21orf41 | 54073 | 21 | 59663325 | 280 | 1.36 | 170 | 1.29 | 2.9 | 448 | 3.92E−03 |
| RS998291 | 1667 | EPHA6 | 285220 | 3 | 98257090 | 386 | 1.33 | 56 | 1.43 | 2.9 | 440 | 3.92E−03 |
| RS10510128 | 2231 | | | 10 | 125050938 | 374 | 1.31 | 56 | 1.42 | 2.9 | 428 | 3.92E−03 |
| RS1169429 | 913 | | | 9 | 86853672 | 361 | 1.35 | 67 | 1.25 | 2.9 | 426 | 3.92E−03 |
| RS2861754 | 1571 | | | 2 | 67931211 | 246 | 1.36 | 162 | 1.29 | 2.9 | 406 | 3.93E−03 |
| RS10490838 | 263 | | | 3 | 24574382 | 467 | 1.33 | 15 | 1.51 | 2.89 | 480 | 4.03E−03 |
| RS1938327 | 1551 | | | 1 | 240789859 | 462 | 1.33 | 18 | 1.5 | 2.89 | 478 | 4.03E−03 |
| RS10484575 | 1977 | ATG5 | 9474 | 6 | 106738553 | 441 | 1.32 | 39 | 1.44 | 2.89 | 478 | 4.03E−03 |
| RS4131643 | 2234 | | | 10 | 125827901 | 225 | 1.37 | 251 | 1.3 | 2.89 | 474 | 4.03E−03 |
| RS1564223 | 2512 | | | 18 | 56563874 | 254 | 1.36 | 222 | 1.3 | 2.89 | 474 | 4.03E−03 |
| RS2672734 | 1806 | EXOC3 | 11336 | 5 | 508696 | 229 | 1.3 | 245 | 1.36 | 2.89 | 472 | 4.03E−03 |
| RS4785953 | 2452 | ADCY9 | 115 | 16 | 4094852 | 415 | 1.32 | 59 | 1.42 | 2.89 | 472 | 4.03E−03 |
| RS10483942 | 2423 | | | 14 | 79548170 | 431 | 1.32 | 39 | 1.44 | 2.89 | 468 | 4.03E−03 |
| RS2001097 | 1939 | | | 6 | 32491836 | 389 | 1.32 | 69 | 1.42 | 2.89 | 456 | 4.04E−03 |
| RS10497352 | 1608 | | | 2 | 170664017 | 91 | 1.41 | 361 | 1.32 | 2.89 | 450 | 4.04E−03 |
| RS1680339 | 2483 | | | 18 | 20555981 | 152 | 1.38 | 268 | 1.31 | 2.89 | 418 | 4.05E−03 |
| RS1480972 | 1718 | | | 4 | 34852796 | 103 | 1.28 | 297 | 1.37 | 2.89 | 398 | 4.06E−03 |

[0178] TABLE 6
SNP markers with P-value less than 0.005 for APOA1 from F-test (one-way ANOVA).
Alleles are codes as 1 = A, 2 = C, 3 = G, and 4 = T. For each group number
of observations ‘n’ and average value ‘avg’ are presented.

| RS_id | SEQ_ID_no | Gene | Gene_id | Chr | Position | g1 | n1 |
|---|---|---|---|---|---|---|---|
| RS6954679 | 728 | | | 7 | 63134099 | 1/1 | 201 |
| RS2854946 | 1259 | SERPINA5 | 5104 | 14 | 94118132 | 2/2 | 13 |
| RS10504433 | 824 | | | 8 | 70021434 | 2/2 | 190 |
| RS1399503 | 1159 | | | 12 | 127204934 | 3/3 | 197 |
| RS10517155 | 330 | | | 4 | 28812651 | 2/2 | 1 |
| RS10503626 | 808 | PSD3 | 23362 | 8 | 18591364 | 1/1 | 2 |
| RS1442799 | 1298 | | | 15 | 96589992 | 2/2 | 210 |
| RS3886738 | 992 | LOC644954 | 644954 | 10 | 63234254 | 1/1 | 1 |
| RS10509160 | 995 | LOC644954 | 644954 | 10 | 63245218 | 2/2 | 1 |
| RS10509161 | 996 | LOC644954 | 644954 | 10 | 63245347 | 1/1 | 1 |
| RS10486467 | 712 | | | 7 | 26621039 | 1/1 | 1 |
| RS2170398 | 773 | | | 8 | 13592708 | 2/2 | 1 |
| RS10510995 | 281 | | | 3 | 70525819 | 1/1 | 1 |
| RS718759 | 575 | | | 5 | 125467810 | 2/2 | 1 |
| RS10498260 | 253 | MGC42174 | 129563 | 2 | 232764865 | 1/1 | 1 |
| RS744832 | 191 | | | 2 | 117565111 | 1/1 | 1 |
| RS10498321 | 1231 | NPAS3 | 64067 | 14 | 33263982 | 1/1 | 181 |
| RS2120650 | 1292 | | | 15 | 84419700 | 1/1 | 216 |
| RS4102401 | 866 | RRM2B | 50484 | 8 | 103288416 | 2/2 | 1 |
| RS352766 | 775 | | | 8 | 15688930 | 2/2 | 1 |
| RS641445 | 1398 | | | 18 | 72182254 | 3/3 | 1 |
| RS10488888 | 395 | | | 4 | 111503157 | 2/2 | 1 |
| RS1467596 | 605 | FLJ33708 | 285780 | 6 | 6360933 | 1/1 | 1 |
| RS2230133 | 580 | TAF7 | 6879 | 5 | 140679241 | 2/2 | 197 |
| RS10485909 | 738 | MAGI2 | 9863 | 7 | 78077684 | 2/2 | 219 |
| RS4960221 | 606 | LY86 | 9450 | 6 | 6547432 | 2/2 | 179 |
| RS10516418 | 384 | | | 4 | 97967932 | 1/1 | 206 |
| RS10521381 | 2582 | | | X | 85978186 | 3/3 | 60 |
| RS470559 | 1399 | MBP | 4155 | 18 | 72887390 | 2/2 | 3 |
| RS10511194 | 1670 | | | 3 | 103457196 | 1/1 | 14 |
| RS547008 | 2299 | | | 11 | 121523071 | 1/1 | 2 |
| RS10507768 | 2359 | | | 13 | 68865849 | 1/3 | 19 |
| RS10509929 | 1021 | | | 10 | 112482278 | 2/2 | 3 |
| RS7413158 | 53 | GBP2 | 2634 | 1 | 89353284 | 1/1 | 6 |
| RS1016579 | 881 | | | 8 | 129269143 | 1/1 | 1 |
| RS3912653 | 1091 | FAT3 | 120114 | 11 | 92135172 | 1/1 | 42 |
| RS2056247 | 1092 | | | 11 | 93315872 | 3/3 | 7 |
| RS10514614 | 2464 | | | 16 | 84837699 | 1/1 | 205 |
| RS10483457 | 1232 | GARNL1 | 253959 | 14 | 35211683 | 1/1 | 209 |
| RS387661 | 587 | GABRG2 | 2566 | 5 | 161476289 | 2/2 | 2 |
| RS5923642 | 2580 | DACH2 | 117154 | X | 85930864 | 1/1 | 69 |
| RS6811055 | 336 | | | 4 | 46586667 | 2/2 | 71 |
| RS10513673 | 1698 | MDS1 | 4197 | 3 | 170736860 | 1/1 | 2 |
| RS10498673 | 1912 | BMP6 | 654 | 6 | 7770256 | 2/2 | 174 |
| RS1867584 | 985 | | | 10 | 49321355 | 2/2 | 72 |
| RS10502465 | 2490 | | | 18 | 20848719 | 1/1 | 4 |
| RS9299445 | 993 | LOC644954 | 644954 | 10 | 63244794 | 2/2 | 199 |
| RS1792369 | 1090 | FAT3 | 120114 | 11 | 92092081 | 1/1 | 42 |
| RS2889611 | 2213 | | | 10 | 49321754 | 1/1 | 83 |
| RS2101435 | 254 | MGC42174 | 129563 | 2 | 232823402 | 2/2 | 184 |
| RS1112809 | 210 | | | 2 | 148197197 | 2/2 | 185 |
| RS1528842 | 209 | | | 2 | 148174046 | 1/1 | 185 |
| RS10493822 | 52 | GBP1 | 2633 | 1 | 89302268 | 2/2 | 5 |
| RS10508901 | 981 | MAPK8 | 5599 | 10 | 49297404 | 3/3 | 83 |
| RS10491954 | 2303 | RAB6IP2 | 23085 | 12 | 1224606 | 1/1 | 17 |
| RS9299446 | 994 | LOC644954 | 644954 | 10 | 63244886 | 1/1 | 2 |
| RS1073939 | 2302 | RAB6IP2 | 23085 | 12 | 1156438 | 1/1 | 143 |
| RS4352250 | 1600 | | | 2 | 167249624 | 2/2 | 165 |
| RS1961544 | 2559 | | | 21 | 19839174 | 2/2 | 189 |
| RS1810113 | 2153 | TM7SF4 | 81501 | 8 | 105433770 | 2/2 | 118 |
| RS548987 | 629 | SLC17A3 | 10786 | 6 | 25977350 | 2/2 | 205 |
| RS2072506 | 722 | AMPH | 273 | 7 | 38468920 | 1/1 | 206 |
| RS2899901 | 2403 | | | 14 | 39602916 | 1/1 | 74 |
| RS4341948 | 1601 | | | 2 | 167249871 | 2/2 | 5 |
| RS9317744 | 1176 | | | 13 | 22963766 | 2/4 | 11 |
| RS1410126 | 687 | C6orf103 | 79747 | 6 | 147125370 | 1/1 | 5 |
| RS10498293 | 2380 | | | 14 | 27284686 | 1/1 | 7 |
| RS10485110 | 682 | | | 6 | 116309557 | 3/3 | 6 |
| RS2235216 | 683 | | | 6 | 116310188 | 1/1 | 6 |
| RS10485864 | 702 | SDK1 | 221935 | 7 | 3890182 | 2/2 | 181 |
| RS10509119 | 988 | ANK3 | 288 | 10 | 61482646 | 1/1 | 194 |
| RS4128928 | 1678 | | | 3 | 119083686 | 2/2 | 36 |
| RS2383024 | 898 | C9orf39 | 54875 | 9 | 17477945 | 1/1 | 101 |
| RS10497298 | 1598 | | | 2 | 167245545 | 1/1 | 5 |
| RS166861 | 2352 | | | 13 | 55557523 | 1/1 | 189 |
| RS1324088 | 628 | | | 6 | 25949101 | 2/2 | 205 |
| RS10516125 | 1893 | | | 5 | 174413439 | 2/4 | 8 |
| RS10497295 | 1597 | | | 2 | 167235217 | 3/3 | 5 |
| RS295577 | 524 | mimitin | 91942 | 5 | 60457592 | 2/2 | 2 |
| RS10493425 | 9 | | | 1 | 67782715 | 1/1 | 207 |
| RS10501797 | 2276 | FAT3 | 120114 | 11 | 92167618 | 2/2 | 32 |
| RS6702277 | 1528 | ESRRG | 2104 | 1 | 215023308 | 1/1 | 19 |
| RS4368350 | 211 | | | 2 | 167249829 | 2/2 | 4 |
| RS10514009 | 2530 | | | 18 | 67250588 | 2/4 | 31 |
| RS1282646 | 2529 | | | 18 | 66590397 | 1/1 | 204 |
| RS1902049 | 154 | LTBP1 | 4052 | 2 | 33223086 | 3/3 | 129 |
| RS1380835 | 1390 | | | 18 | 39747045 | 3/3 | 176 |
| RS2255565 | 194 | | | 2 | 118114972 | 1/1 | 184 |
| RS2793207 | 1900 | CDYL | 9425 | 6 | 4901002 | 1/1 | 215 |
| RS10503573 | 780 | MSR1 | 4481 | 8 | 16047855 | 1/1 | 227 |
| RS10521382 | 2581 | DACH2 | 117154 | X | 85931510 | 1/1 | 62 |
| RS2113515 | 195 | | | 2 | 118115259 | 2/2 | 180 |
| RS692419 | 1819 | | | 5 | 18024601 | 2/2 | 64 |
| RS10484066 | 2428 | | | 14 | 98519148 | 1/1 | 133 |
| RS1329120 | 1499 | GBP2 | 2634 | 1 | 89357153 | 1/1 | 7 |
| RS1406444 | 1595 | | | 2 | 148189717 | 1/1 | 186 |
| RS10504166 | 2123 | LOC392222 | 392222 | 8 | 55556364 | 1/1 | 4 |
| RS572241 | 2264 | FAT3 | 120114 | 11 | 91942082 | 2/2 | 78 |
| RS1945011 | 2298 | GRIK4 | 2900 | 11 | 120126812 | 1/1 | 4 |
| RS536617 | 2266 | FAT3 | 120114 | 11 | 91943638 | 2/2 | 80 |
| RS8068574 | 1343 | | | 17 | 50327246 | 1/1 | 146 |
| RS10487012 | 2054 | | | 7 | 87854386 | 2/2 | 154 |
| RS866651 | 262 | THRB | 7068 | 3 | 24237159 | 2/2 | 161 |
| RS3760626 | 2533 | CLPTM1 | 1209 | 19 | 50148945 | 1/1 | 66 |
| RS10491855 | 947 | | | 9 | 119335541 | 2/2 | 17 |
| RS2099803 | 2228 | | | 10 | 109365959 | 1/1 | 48 |
| RS1509649 | 1599 | | | 2 | 167247754 | 2/2 | 5 |
| RS10489249 | 88 | | | 1 | 169981144 | 2/2 | 175 |
| RS877345 | 958 | TAF3 | 83860 | 10 | 8093782 | 1/1 | 180 |
| RS3116231 | 252 | MGC42174 | 129563 | 2 | 232600527 | 2/2 | 2 |
| RS950206 | 1791 | | | 4 | 116400004 | 2/2 | 34 |
| RS1828384 | 2335 | | | 12 | 114060113 | 2/2 | 51 |
| RS10495074 | 1530 | LOC128153 | 128153 | 1 | 215998288 | 2/2 | 87 |
| RS10483507 | 2405 | | | 14 | 39614861 | 1/1 | 53 |
| RS7792197 | 2055 | | | 7 | 87899449 | 1/1 | 4 |
| RS7412987 | 1532 | LOC128153 | 128153 | 1 | 216013079 | 2/2 | 31 |
| RS6838 | 2230 | ACADSB | 36 | 10 | 124807738 | 1/1 | 36 |
| RS950085 | 1006 | | | 10 | 95592637 | 1/1 | 24 |
| RS1919447 | 1593 | | | 2 | 148179334 | 2/2 | 184 |
| RS12026256 | 1511 | | | 1 | 175700199 | 1/1 | 154 |
| RS283063 | 1987 | SLC35F1 | 222553 | 6 | 118728007 | 3/4 | 36 |
| RS1456196 | 293 | | | 3 | 119137243 | 1/1 | 4 |
| RS4516081 | 2367 | | | 13 | 89219195 | 2/2 | 105 |
| RS10498032 | 239 | ABCA12 | 26154 | 2 | 215662730 | 1/1 | 29 |
| RS8049647 | 1310 | | | 16 | 50695297 | 1/1 | 163 |
| RS10485435 | 1964 | BAI3 | 577 | 6 | 69672336 | 1/1 | 21 |
| RS10503419 | 771 | | | 8 | 11164210 | 1/1 | 150 |
| RS10484065 | 2427 | | | 14 | 98518521 | 1/1 | 134 |
| RS10495783 | 155 | LTBP1 | 4052 | 2 | 33255136 | 2/2 | 48 |
| RS6919514 | 688 | UST | 10090 | 6 | 149151922 | 3/4 | 41 |
| RS10489251 | 89 | | | 1 | 169984157 | 3/3 | 5 |
| RS1372184 | 2227 | | | 10 | 109230619 | 3/3 | 147 |
| RS10485116 | 1946 | LOC653802 | 653802 | 6 | 42430492 | 2/4 | 9 |
| RS250387 | 518 | ARL15 | 54622 | 5 | 53620394 | 1/1 | 168 |
| RS817504 | 1679 | | | 3 | 119161552 | 3/3 | 152 |
| RS1407390 | 931 | C9orf84 | 158401 | 9 | 113504308 | 2/2 | 165 |
| RS9308931 | 156 | LTBP1 | 4052 | 2 | 33275201 | 1/1 | 61 |
| RS1884772 | 2404 | | | 14 | 39609074 | 2/2 | 54 |
| RS227521 | 1510 | ASTN | 460 | 1 | 175355785 | 1/1 | 191 |
| RS2353296 | 1733 | | | 4 | 47956320 | 1/1 | 1 |
| RS10241173 | 2065 | | | 7 | 124240494 | 1/1 | 162 |
| RS10508896 | 2210 | MARCH8 | 220972 | 10 | 45350649 | 1/1 | 213 |
| RS2292889 | 2250 | DEPC-1 | 221120 | 11 | 43898353 | 2/2 | 8 |
| RS10486853 | 2058 | FLJ36166 | 349152 | 7 | 102642309 | 2/2 | 189 |
| RS1559751 | 1525 | | | 1 | 198148785 | 1/1 | 105 |
| RS10484317 | 604 | FARS2 | 10667 | 6 | 5614669 | 2/2 | 217 |
| RS896990 | 251 | MGC42174 | 129563 | 2 | 232597100 | 1/1 | 2 |
| RS965193 | 1577 | | | 2 | 118106053 | 3/3 | 161 |
| RS7850478 | 946 | | | 9 | 119326659 | 1/1 | 17 |
| RS6492611 | 2369 | GPC5 | 2262 | 13 | 91940707 | 1/1 | 14 |
| RS492681 | 2472 | | | 18 | 9853662 | 2/2 | 12 |
| RS1029233 | 1452 | | | 21 | 32327571 | 1/1 | 23 |
| RS487707 | 2297 | FAM55D | 54827 | 11 | 113955918 | 1/1 | 116 |
| RS1427421 | 1661 | MITF | 4286 | 3 | 69870404 | 1/1 | 3 |
| RS10520892 | 1820 | | | 5 | 23623415 | 2/2 | 197 |
| RS10484921 | 2009 | | | 6 | 152083953 | 1/1 | 22 |
| RS1880438 | 2256 | LOC283247 | 283247 | 11 | 49327274 | 2/2 | 107 |
| RS945849 | 933 | C9orf84 | 158401 | 9 | 113545740 | 1/1 | 161 |
| RS10518821 | 1289 | | | 15 | 67669717 | 1/1 | 154 |
| RS352427 | 816 | | | 8 | 28571996 | 1/1 | 226 |
| RS768747 | 2300 | | | 11 | 123133551 | 2/2 | 167 |
| RS295525 | 525 | | | 5 | 60508623 | 2/2 | 2 |
| RS10517836 | 1747 | | | 4 | 63541480 | 2/2 | 186 |
| RS6477845 | 930 | C9orf84 | 158401 | 9 | 113502143 | 1/1 | 3 |
| RS7874576 | 896 | | | 9 | 12600410 | 1/3 | 4 |
| RS823638 | 934 | C9orf84 | 158401 | 9 | 113582582 | 1/1 | 3 |
| RS1387551 | 2135 | | | 8 | 82842822 | 2/2 | 1 |
| RS962592 | 476 | | | 4 | 181229107 | 2/2 | 234 |
| RS10500985 | 1052 | LUZP2 | 338645 | 11 | 24590527 | 1/1 | 6 |
| RS7470491 | 932 | C9orf84 | 158401 | 9 | 113530129 | 2/2 | 161 |
| RS9294812 | 1965 | BAI3 | 577 | 6 | 69674845 | 2/2 | 115 |
| RS7719212 | 501 | | | 5 | 23658681 | 2/2 | 222 |
| RS2291386 | 2013 | SYTL3 | 94120 | 6 | 159104495 | 2/2 | 215 |
| RS10498292 | 1229 | | | 14 | 27284462 | 1/1 | 165 |
| RS10494066 | 81 | NTNG1 | 22854 | 1 | 107591031 | 2/2 | 6 |
| RS9303347 | 1342 | | | 17 | 49585177 | 1/1 | 1 |
| RS10521202 | 2470 | KIAA0672 | 9912 | 17 | 12755289 | 2/2 | 52 |
| RS700049 | 2192 | | | 9 | 113622470 | 1/1 | 3 |
| RS9304301 | 1391 | | | 18 | 40017390 | 2/2 | 217 |
| RS718153 | 1554 | | | 2 | 30117122 | 1/1 | 26 |
| RS1893120 | 1788 | NDST4 | 64579 | 4 | 116230217 | 2/2 | 31 |
| RS10500668 | 1039 | | | 11 | 6285001 | 2/2 | 1 |
| RS10497650 | 223 | | | 2 | 184931280 | 2/4 | 5 |
| RS878016 | 757 | DLGAP2 | 9228 | 8 | 1585693 | 1/1 | 130 |
| RS2474263 | 678 | LOC442238 | 442238 | 6 | 100641976 | 3/3 | 33 |
| RS10518533 | 420 | | | 4 | 129677708 | 1/1 | 4 |
| RS1566728 | 1075 | PTPRJ | 5795 | 11 | 48121423 | 1/1 | 132 |
| RS7841198 | 2096 | PSD3 | 23362 | 8 | 18597648 | 2/2 | 1 |
| RS3827702 | 1423 | TASP1 | 55617 | 20 | 13446812 | 2/2 | 120 |
| RS901682 | 2208 | MARCH8 | 220972 | 10 | 45285867 | 1/1 | 2 |
| RS10490353 | 172 | UNQ6975 | 400952 | 2 | 45270098 | 2/2 | 196 |
| RS246558 | 1848 | | | 5 | 71859074 | 1/1 | 173 |
| RS10513993 | 2528 | | | 18 | 66588976 | 3/3 | 1 |
| RS8027192 | 2450 | | | 15 | 69793594 | 2/2 | 6 |
| RS9327673 | 1885 | | | 5 | 133230970 | 1/1 | 21 |
| RS7107851 | 2287 | HEPHL1 | 341208 | 11 | 93396703 | 2/2 | 154 |
| RS6798797 | 271 | | | 3 | 40741966 | 1/1 | 220 |
| RS2369669 | 2301 | RAB6IP2 | 23085 | 12 | 1080279 | 1/1 | 113 |
| RS967326 | 2094 | PSD3 | 23362 | 8 | 18591541 | 2/2 | 209 |
| RS10484518 | 698 | | | 6 | 164182068 | 3/3 | 23 |
| RS10521979 | 1461 | DMD | 1756 | X | 31697540 | 3/3 | 41 |
| RS965158 | 868 | | | 8 | 107564094 | 2/4 | 11 |
| RS2294311 | 1457 | HSPC117 | 51493 | 22 | 3112369 | 1/1 | 16 |
| RS10497649 | 1611 | | | 2 | 184930781 | 1/3 | 7 |
| RS1217654 | 761 | CSMD1 | 64478 | 8 | 4294769 | 2/2 | 194 |
| RS1773409 | 1535 | | | 1 | 234905895 | 1/1 | 6 |
| RS9323682 | 2422 | | | 14 | 79536316 | 1/1 | 2 |
| RS2503102 | 679 | LOC442238 | 442238 | 6 | 100650488 | 1/1 | 99 |
| RS3745718 | 1414 | CARD8 | 22900 | 19 | 53406965 | 1/1 | 74 |
| RS370480 | 2353 | | | 13 | 55575987 | 3/3 | 22 |
| RS1217656 | 759 | CSMD1 | 64478 | 8 | 4293171 | 1/1 | 1 |
| RS10510715 | 269 | | | 3 | 40714716 | 2/2 | 2 |
| RS4510935 | 945 | | | 9 | 119325172 | 2/2 | 6 |
| RS2064572 | 1969 | | | 6 | 92111778 | 1/1 | 66 |
| RS10486848 | 2052 | SEMA3D | 223117 | 7 | 84575619 | 2/2 | 165 |
| RS10515869 | 1891 | | | 5 | 163444804 | 1/1 | 49 |
| RS10499436 | 2020 | | | 7 | 13649002 | 1/1 | 19 |
| RS10510714 | 270 | | | 3 | 40736947 | 1/1 | 224 |
| RS724620 | 2579 | DACH2 | 117154 | X | 85825740 | 2/2 | 72 |
| RS6109935 | 1424 | TASP1 | 55617 | 20 | 13467837 | 2/2 | 19 |
| RS10521613 | 2576 | MID1 | 4281 | X | 10555454 | 2/2 | 12 |
| RS10505439 | 2162 | C8ORFK36 | 340359 | 8 | 124731285 | 1/1 | 1 |
| RS2045765 | 1760 | | | 4 | 63775688 | 2/2 | 189 |
| RS10512041 | 2189 | | | 9 | 77255358 | 2/2 | 1 |
| RS10504143 | 2121 | RB1CC1 | 9821 | 8 | 53714280 | 2/4 | 20 |
| RS6079097 | 2542 | TASP1 | 55617 | 20 | 13474577 | 1/1 | 18 |
| RS10494583 | 1514 | TPR | 7175 | 1 | 184557118 | 2/2 | 152 |
| RS1527420 | 196 | | | 2 | 119267761 | 1/1 | 176 |
| RS3218493 | 2069 | XRCC2 | 7516 | 7 | 151984596 | 2/3 | 10 |
| RS10499437 | 2021 | | | 7 | 13649243 | 1/1 | 19 |
| RS10512980 | 1823 | | | 5 | 51991165 | 1/1 | 26 |
| RS10485441 | 2557 | BCAS1 | 8537 | 20 | 51997775 | 1/1 | 2 |
| RS10509448 | 1005 | NRG3 | 10718 | 10 | 83972610 | 2/2 | 208 |
| RS32967 | 1852 | | | 5 | 80214012 | 2/2 | 15 |
| RS2371319 | 268 | | | 3 | 40701948 | 2/2 | 2 |
| RS10496649 | 203 | | | 2 | 126293862 | 2/2 | 200 |
| RS1462478 | 1708 | | | 3 | 194331608 | 2/2 | 138 |
| RS773013 | 2188 | | | 9 | 76973237 | 2/4 | 9 |
| RS6830598 | 1775 | NDST4 | 64579 | 4 | 116084463 | 2/2 | 35 |
| RS1959715 | 2426 | | | 14 | 87234963 | 1/1 | 1 |
| RS2111368 | 2341 | | | 12 | 126098472 | 1/1 | 168 |
| RS965788 | 2203 | PLXDC2 | 84898 | 10 | 20241557 | 1/1 | 11 |
| RS4564209 | 1531 | LOC128153 | 128153 | 1 | 215999639 | 2/2 | 97 |
| RS1889465 | 1985 | SLC35F1 | 222553 | 6 | 118649503 | 1/1 | 206 |
| RS10485490 | 2535 | | | 20 | 5376494 | 2/2 | 219 |
| RS6735220 | 229 | HECW2 | 57520 | 2 | 196963731 | 2/2 | 200 |
| RS1427422 | 1660 | | | 3 | 69866955 | 2/2 | 3 |
| RS245340 | 1851 | MSH3 | 4437 | 5 | 80197256 | 3/3 | 15 |
| RS4131462 | 1972 | | | 6 | 99364568 | 2/2 | 101 |
| RS207616 | 1564 | | | 2 | 40952801 | 1/1 | 97 |
| RS672489 | 1674 | | | 3 | 111133475 | 2/2 | 93 |
| RS7829473 | 2111 | | | 8 | 30297511 | 2/2 | 138 |
| RS1459914 | 280 | | | 3 | 67849940 | 3/3 | 195 |
| RS10501811 | 2282 | | | 11 | 93309061 | 1/1 | 2 |
| RS890783 | 1845 | | | 5 | 71031294 | 1/1 | 197 |
| RS10497472 | 1609 | | | 2 | 177492847 | 2/4 | 30 |
| RS709087 | 1700 | | | 3 | 192938993 | 2/2 | 123 |
| RS3104997 | 2143 | | | 8 | 96630910 | 2/2 | 17 |
| RS1235012 | 760 | CSMD1 | 64478 | 8 | 4294524 | 2/2 | 201 |
| RS1589629 | 2258 | | | 11 | 50431035 | 1/1 | 17 |
| RS10483456 | 2396 | GARNL1 | 253959 | 14 | 35105918 | 2/2 | 179 |
| RS10521240 | 2459 | | | 16 | 49914823 | 1/1 | 6 |
| RS4739647 | 2140 | | | 8 | 83563963 | 1/1 | 6 |
| RS1121640 | 1099 | | | 11 | 96694636 | 2/2 | 210 |
| RS10512000 | 2186 | | | 9 | 73345993 | 2/4 | 37 |
| RS10486470 | 2028 | | | 7 | 26636375 | 1/1 | 11 |
| RS1362406 | 2458 | DNAJA2 | 10294 | 16 | 45554058 | 3/3 | 214 |
| RS8054578 | 1323 | | | 16 | 77874316 | 1/1 | 3 |
| RS1228685 | 2015 | | | 6 | 165388456 | 3/3 | 181 |
| RS10508903 | 983 | MAPK8 | 5599 | 10 | 49311338 | 1/1 | 45 |
| RS6068024 | 2556 | | | 20 | 50001018 | 2/2 | 57 |
| RS4945630 | 1990 | | | 6 | 119472010 | 1/1 | 86 |
| RS2425570 | 2554 | PTPRT | 11122 | 20 | 41111765 | 2/2 | 158 |
| RS758780 | 2036 | PTHB1 | 27241 | 7 | 33444985 | 2/2 | 94 |
| RS758779 | 2037 | PTHB1 | 27241 | 7 | 33445083 | 1/1 | 94 |
| RS798101 | 2431 | LOC643811 | 643811 | 15 | 28890187 | 2/2 | 67 |
| RS6895637 | 1821 | ADAMTS12 | 81792 | 5 | 33785569 | 3/3 | 112 |
| RS6777583 | 1671 | | | 3 | 107546384 | 2/2 | 75 |
| RS10518896 | 2439 | C15orf41 | 84529 | 15 | 34731373 | 2/4 | 13 |
| RS10498944 | 1968 | | | 6 | 85414678 | 1/1 | 2 |
| RS4631686 | 3 | | | 1 | 14450061 | 1/3 | 8 |
| RS10503057 | 2520 | PIGN | 23556 | 18 | 57905398 | 1/1 | 152 |
| RS246580 | 1846 | | | 5 | 71851370 | 2/2 | 173 |
| RS719530 | 2059 | | | 7 | 109678201 | 2/2 | 54 |
| RS10483942 | 2423 | | | 14 | 79548170 | 2/2 | 2 |
| RS1499976 | 1684 | LOC389142 | 389142 | 3 | 119284020 | 2/2 | 148 |
| RS2769261 | 1504 | | | 1 | 113368430 | 1/1 | 10 |
| RS752355 | 213 | | | 2 | 176428271 | 1/1 | 15 |
| RS10485492 | 2536 | | | 20 | 5376989 | 2/2 | 1 |
| RS2296697 | 40 | LPHN2 | 23266 | 1 | 82209807 | 2/2 | 169 |
| RS717806 | 160 | | | 2 | 36429039 | 1/1 | 11 |
| RS1887545 | 1508 | POGZ | 23126 | 1 | 149651335 | 1/1 | 3 |
| RS1506672 | 2128 | XKR4 | 114786 | 8 | 56438061 | 2/2 | 42 |
| RS10494584 | 1515 | TPR | 7175 | 1 | 184557144 | 2/2 | 153 |
| RS1480145 | 796 | | | 8 | 16181494 | 2/2 | 229 |
| RS3218491 | 753 | XRCC2 | 7516 | 7 | 151984681 | 2/4 | 6 |
| RS10510104 | 1030 | ATE1 | 11101 | 10 | 123521812 | 2/2 | 5 |
| RS1465135 | 697 | | | 6 | 164115617 | 1/1 | 120 |
| RS1010504 | 2136 | | | 8 | 82922818 | 1/1 | 1 |
| RS956408 | 2304 | RAB6IP2 | 23085 | 12 | 1376941 | 2/2 | 112 |
| RS10497568 | 1610 | | | 2 | 181147675 | 2/2 | 44 |
| RS10510986 | 1655 | | | 3 | 69746452 | 1/1 | 194 |
| RS929332 | 2043 | | | 7 | 45300667 | 2/2 | 129 |
| RS6772743 | 1657 | | | 3 | 69804679 | 2/2 | 9 |
| RS10521297 | 2471 | | | 17 | 14999716 | 1/1 | 191 |
| RS7775656 | 1913 | TXNDC5 | 81567 | 6 | 7954759 | 1/1 | 164 |
| RS2291385 | 2014 | SYTL3 | 94120 | 6 | 159104665 | 1/3 | 25 |
| RS10490656 | 1562 | KIAA1414 | 54497 | 2 | 37085212 | 1/1 | 140 |
| RS3820182 | 1513 | TPR | 7175 | 1 | 184556956 | 1/1 | 7 |
| RS6990997 | 867 | ZFPM2 | 23414 | 8 | 106881703 | 2/2 | 6 |
| RS1883736 | 2248 | ABTB2 | 25841 | 11 | 34330019 | 1/3 | 14 |
| RS228563 | 1491 | | | 1 | 79418807 | 1/1 | 45 |
| RS2353193 | 1607 | | | 2 | 170142309 | 2/2 | 157 |
| RS10483887 | 2420 | ADCK1 | 57143 | 14 | 77355667 | 2/2 | 1 |
| RS10492047 | 1158 | LOC144678 | 144678 | 12 | 125501283 | 3/3 | 2 |
| RS6955049 | 2051 | CALN1 | 83698 | 7 | 71135644 | 1/1 | 1 |
| RS7181421 | 1291 | | | 15 | 77626966 | 2/2 | 91 |
| RS246575 | 1847 | | | 5 | 71855573 | 1/1 | 172 |
| RS10510809 | 274 | | | 3 | 59414093 | 2/2 | 164 |
| RS10517211 | 1717 | | | 4 | 30253481 | 2/2 | 184 |
| RS10517954 | 1802 | | | 4 | 168847633 | 1/1 | 6 |
| RS7529360 | 1489 | C1orf139 | 79971 | 1 | 68382555 | 2/2 | 94 |
| RS1046852 | 20 | C1orf139 | 79971 | 1 | 68363692 | 1/1 | 37 |
| RS10509702 | 1009 | | | 10 | 97914086 | 1/1 | 228 |
| RS958425 | 2204 | C10orf115 | 387642 | 10 | 23551932 | 1/1 | 180 |
| RS4673999 | 1612 | | | 2 | 216058272 | 1/1 | 64 |
| RS4888946 | 1324 | | | 16 | 77874931 | 1/1 | 171 |
| RS2163721 | 2333 | PPFIA2 | 8499 | 12 | 80343092 | 2/2 | 227 |
| RS7782588 | 2027 | | | 7 | 26635712 | 1/1 | 157 |
| RS10489688 | 1523 | | | 1 | 197054569 | 1/1 | 108 |
| RS10514844 | 1182 | | | 13 | 37808480 | 2/3 | 7 |
| RS779320 | 1702 | | | 3 | 193065627 | 2/2 | 120 |
| RS3749216 | 1650 | FAM19A1 | 407738 | 3 | 68548925 | 1/1 | 237 |
| RS10496466 | 1573 | | | 2 | 115053720 | 2/2 | 127 |
| RS650298 | 1466 | FBXO42 | 54455 | 1 | 16538195 | 2/2 | 75 |
| RS2671762 | 1633 | | | 3 | 5110111 | 2/2 | 194 |
| RS10517293 | 1737 | | | 4 | 54284572 | 1/3 | 30 |
| RS1851006 | 1278 | UNC13C | 440279 | 15 | 52691684 | 2/2 | 45 |
| RS2761089 | 2005 | | | 6 | 145473596 | 2/2 | 80 |
| RS10510987 | 1656 | | | 3 | 69785447 | 2/2 | 3 |
| RS362865 | 2007 | GRM1 | 2911 | 6 | 146704527 | 2/2 | 180 |
| RS8089476 | 1392 | | | 18 | 46107418 | 2/2 | 33 |
| RS1805781 | 1111 | PHC1 | 1911 | 12 | 8957155 | 1/3 | 6 |
| RS6837953 | 437 | | | 4 | 154150413 | 1/1 | 1 |
| RS4504494 | 2001 | ARHGAP18 | 93663 | 6 | 129954780 | 1/3 | 13 |
| RS7556543 | 1512 | PRG4 | 10216 | 1 | 184537042 | 1/1 | 7 |
| RS2001097 | 1939 | | | 6 | 32491836 | 1/1 | 5 |
| RS286300 | 1404 | LOC401898 | 401898 | 19 | 11658308 | 2/2 | 213 |
| RS10484926 | 2006 | | | 6 | 146336371 | 2/2 | 233 |
| RS2290547 | 272 | HYPB | 29072 | 3 | 47036187 | 1/1 | 13 |
| RS543465 | 1980 | ATG5 | 9474 | 6 | 106855297 | 2/2 | 203 |
| RS320694 | 2067 | | | 7 | 136695249 | 2/2 | 49 |
| RS9329911 | 2141 | | | 8 | 86594772 | 1/1 | 121 |
| RS10486471 | 2029 | | | 7 | 26636424 | 2/2 | 11 |
| RS6938470 | 640 | | | 6 | 47446050 | 1/1 | 3 |
| RS1501622 | 1705 | FGF12 | 2257 | 3 | 193634069 | 2/2 | 45 |
| RS4611835 | 313 | NAALADL2 | 254827 | 3 | 176610769 | 1/1 | 2 |
| RS10483426 | 2393 | NPAS3 | 64067 | 14 | 32670589 | 2/2 | 63 |
| RS2292250 | 1634 | SRGAP3 | 9901 | 3 | 9064178 | 1/1 | 213 |
| RS4952605 | 1563 | SLC8A1 | 6546 | 2 | 40376993 | 1/1 | 21 |
| RS1957425 | 2417 | | | 14 | 64428329 | 1/1 | 102 |
| RS3773636 | 1640 | TGFBR2 | 7048 | 3 | 30675445 | 1/1 | 13 |
| RS4405428 | 1213 | GPC5 | 2262 | 13 | 91916519 | 2/2 | 183 |
| RS10498096 | 1613 | | | 2 | 221469394 | 2/2 | 1 |
| RS2316853 | 2575 | | | X | 2575296 | 2/2 | 27 |
| RS723043 | 157 | LTBP1 | 4052 | 2 | 33395291 | 3/3 | 68 |
| RS2217610 | 700 | SDK1 | 221935 | 7 | 3697162 | 1/1 | 137 |
| RS1878144 | 193 | | | 2 | 117895659 | 3/3 | 181 |
| RS10496527 | 1575 | | | 2 | 117242961 | 2/2 | 42 |
| RS2971828 | 1567 | | | 2 | 66408091 | 1/1 | 156 |
| RS2669892 | 290 | ZBTB20 | 26137 | 3 | 115817713 | 1/1 | 159 |
| RS1915546 | 841 | | | 8 | 80202606 | 2/2 | 77 |
| RS823692 | 1907 | | | 6 | 7435616 | 1/1 | 1 |
| RS1334722 | 2201 | ITIH5 | 80760 | 10 | 7715013 | 1/1 | 107 |
| RS580758 | 390 | | | 4 | 105790400 | 1/1 | 4 |
| RS285406 | 855 | | | 8 | 87094129 | 2/2 | 219 |
| RS10500683 | 2235 | | | 11 | 7145579 | 2/2 | 93 |
| RS1413191 | 2370 | GPC5 | 2262 | 13 | 92011477 | 1/1 | 5 |
| RS600524 | 1570 | | | 2 | 67527284 | 2/2 | 100 |
| RS1506326 | 2525 | KIAA1468 | 57614 | 18 | 58099371 | 3/3 | 11 |
| RS10495774 | 150 | | | 2 | 30360180 | 2/2 | 10 |
| RS10497783 | 230 | HECW2 | 57520 | 2 | 196963769 | 1/1 | 2 |
| RS1579274 | 2119 | | | 8 | 41778080 | 1/1 | 19 |
| RS10503572 | 789 | | | 8 | 16131101 | 1/3 | 5 |
| RS2195989 | 872 | ANGPT1 | 284 | 8 | 108555088 | 2/2 | 9 |
| RS2223753 | 2538 | | | 20 | 6615135 | 1/1 | 76 |
| RS737769 | 2569 | RUTBC2 | 129049 | 22 | 23605393 | 2/4 | 37 |
| RS39626 | 1850 | MSH3 | 4437 | 5 | 80154550 | 2/2 | 130 |
| RS7828096 | 2095 | PSD3 | 23362 | 8 | 18597554 | 1/1 | 1 |
| RS10518660 | 1492 | LPHN2 | 23266 | 1 | 82154655 | 1/1 | 210 |
| RS958978 | 1614 | SP110 | 3431 | 2 | 230758230 | 1/1 | 145 |
| RS717897 | 2255 | OR4C4P | 79550 | 11 | 48332180 | 1/1 | 11 |
| RS10517210 | 1716 | | | 4 | 30253178 | 2/2 | 1 |
| RS720614 | 2064 | | | 7 | 124240026 | 2/2 | 9 |
| RS6949530 | 2062 | | | 7 | 122406461 | 1/1 | 174 |
| RS989177 | 748 | | | 7 | 124200122 | 2/2 | 13 |
| RS2591651 | 1826 | PDE4D | 5144 | 5 | 58615479 | 1/3 | 5 |
| RS962354 | 1738 | | | 4 | 56214479 | 1/1 | 172 |
| RS590599 | 2010 | | | 6 | 153161845 | 2/2 | 7 |
| RS198278 | 711 | | | 7 | 24214718 | 1/1 | 53 |
| RS870241 | 1654 | FAM19A4 | 151647 | 3 | 68908072 | 2/2 | 123 |
| RS727505 | 2066 | | | 7 | 124249317 | 2/2 | 157 |
| RS10503068 | 2526 | KIAA1468 | 57614 | 18 | 58102113 | 2/2 | 10 |
| RS1356216 | 192 | | | 2 | 117879031 | 3/3 | 187 |
| RS10483988 | 1250 | GALC | 2581 | 14 | 87504310 | 2/2 | 173 |
| RS2040868 | 2042 | | | 7 | 45293528 | 2/2 | 128 |
| RS694795 | 1666 | | | 3 | 85016728 | 1/1 | 53 |
| RS4073474 | 294 | IQCB1 | 9657 | 3 | 122990105 | 1/1 | 100 |
| RS10513166 | 1818 | | | 5 | 14046495 | 2/2 | 2 |
| RS9306468 | 2570 | MTMR3 | 8897 | 22 | 28704281 | 1/1 | 146 |
| RS2825652 | 1441 | | | 21 | 19865219 | 2/2 | 230 |
| RS9325559 | 2229 | EIF3S10 | 8661 | 10 | 120811615 | 1/1 | 6 |
| RS1519684 | 1983 | | | 6 | 114571663 | 2/2 | 28 |
| RS4533975 | 1959 | | | 6 | 68537723 | 2/2 | 156 |
| RS2973234 | 1725 | | | 4 | 37143568 | 2/2 | 115 |
| RS10513319 | 952 | | | 9 | 119741270 | 1/1 | 224 |
| RS847852 | 1940 | ANKS1 | 23294 | 6 | 35012070 | 1/1 | 39 |
| RS9319997 | 2522 | PIGN | 23556 | 18 | 57925017 | 2/2 | 151 |
| RS953177 | 823 | DNAJC5B | 85479 | 8 | 67096174 | 2/2 | 213 |
| RS10489474 | 1509 | PAPPA2 | 60676 | 1 | 174809772 | 2/2 | 159 |
| RS10490347 | 1566 | FLJ10379 | 55133 | 2 | 45548444 | 2/2 | 1 |
| RS947271 | 1507 | REG4 | 83998 | 1 | 120138926 | 1/1 | 56 |
| RS1608272 | 2259 | | | 11 | 50446832 | 1/1 | 129 |
| RS9320780 | 1991 | | | 6 | 121303614 | 1/1 | 13 |
| RS10516971 | 1769 | UNC5C | 8633 | 4 | 96560069 | 1/1 | 139 |
| RS4597125 | 2331 | | | 12 | 74694839 | 1/1 | 6 |
| RS10493351 | 1482 | | | 1 | 63946731 | 2/2 | 231 |
| RS756458 | 2463 | CDH13 | 1012 | 16 | 81846617 | 2/2 | 18 |
| RS333856 | 1576 | | | 2 | 117692216 | 1/2 | 7 |
| RS6844368 | 1764 | FRAS1 | 80144 | 4 | 79658959 | 3/3 | 38 |
| RS4146127 | 350 | | | 4 | 59114124 | 1/1 | 161 |
| RS1254275 | 2415 | | | 14 | 59915736 | 3/3 | 6 |
| RS2804861 | 2206 | | | 10 | 33815896 | 1/1 | 169 |
| RS1268444 | 1937 | | | 6 | 30519525 | 2/2 | 87 |
| RS176157 | 2568 | CABIN1 | 23523 | 22 | 22833987 | 1/1 | 2 |
| RS10506681 | 2328 | | | 12 | 73653196 | 2/2 | 99 |
| RS1581412 | 1697 | RSRC1 | 51319 | 3 | 159374881 | 2/2 | 32 |
| RS2111826 | 309 | CLDN11 | 5010 | 3 | 171623540 | 1/3 | 37 |
| RS2018842 | 1696 | | | 3 | 148362044 | 1/1 | 80 |
| RS1298362 | 1136 | | | 12 | 74493708 | 1/1 | 52 |
| RS4492337 | 2142 | C8orf37 | 157657 | 8 | 96336117 | 1/1 | 109 |
| RS2246219 | 1672 | GUCA1C | 9626 | 3 | 110141846 | 1/1 | 17 |
| RS9285977 | 1914 | | | 6 | 8517284 | 2/2 | 68 |
| RS9322914 | 2392 | NPAS3 | 64067 | 14 | 32571950 | 2/2 | 178 |
| RS4721923 | 2024 | LOC646385 | 646385 | 7 | 20604246 | 3/3 | 21 |
| RS4140855 | 2155 | | | 8 | 117023770 | 1/1 | 8 |
| RS10518014 | 1761 | | | 4 | 67282503 | 1/1 | 20 |
| RS1979739 | 2433 | RYR3 | 6263 | 15 | 31737586 | 1/1 | 34 |
| RS10515526 | 1886 | | | 5 | 143157421 | 1/3 | 7 |
| RS2887919 | 1647 | | | 3 | 39791844 | 1/1 | 21 |
| RS6954168 | 755 | LOC653748 | 653748 | 7 | 153727085 | 2/2 | 233 |
| RS2825673 | 2561 | | | 21 | 19888587 | 2/2 | 6 |
| RS4608876 | 1794 | | | 4 | 117668911 | 1/1 | 104 |
| RS7241109 | 2473 | C18orf1 | 753 | 18 | 13303114 | 1/1 | 112 |
| RS2042651 | 1795 | | | 4 | 117669326 | 1/1 | 18 |
| RS4661451 | 1465 | | | 1 | 14133149 | 1/1 | 53 |
| RS6708913 | 1596 | | | 2 | 165583661 | 1/1 | 3 |
| RS211587 | 1695 | NMNAT3 | 349565 | 3 | 140763843 | 2/2 | 2 |
| RS2409113 | 2076 | LOC645960 | 645960 | 8 | 8849712 | 2/2 | 152 |
| RS7926211 | 2257 | TYRL | 7300 | 11 | 49394908 | 1/1 | 20 |
| RS11232919 | 1087 | LOC646176 | 646176 | 11 | 81284714 | 2/2 | 2 |
| RS720613 | 749 | | | 7 | 124239906 | 2/2 | 142 |
| RS10498518 | 2416 | | | 14 | 64427295 | 1/1 | 30 |
| RS2670607 | 201 | | | 2 | 124114105 | 1/1 | 3 |
| RS10506700 | 2323 | | | 12 | 73340061 | 2/2 | 150 |
| RS10496626 | 1578 | CNTNAP5 | 129648 | 2 | 124593042 | 2/4 | 19 |
| RS10514450 | 1322 | | | 16 | 77874213 | 2/2 | 3 |
| RS2288272 | 1669 | ZBTB11 | 27107 | 3 | 102861166 | 2/2 | 113 |
| RS1938327 | 1551 | | | 1 | 240789859 | 1/1 | 222 |
| RS1296210 | 1522 | | | 1 | 197008567 | 2/2 | 57 |
| RS10495058 | 1529 | GPATC2 | 55105 | 1 | 215697001 | 1/3 | 7 |
| RS10507605 | 2350 | | | 13 | 55506479 | 1/1 | 211 |
| RS1944989 | 2510 | CCBE1 | 147372 | 18 | 55353222 | 1/1 | 14 |
| RS10490838 | 263 | | | 3 | 24574382 | 1/1 | 226 |
| RS2257086 | 1984 | | | 6 | 116925713 | 2/2 | 134 |
| RS6601146 | 1899 | LOC646210 | 646210 | 5 | 180226111 | 3/3 | 23 |
| RS25931 | 1816 | CTNND2 | 1501 | 5 | 11560083 | 2/3 | 38 |
| RS10516613 | 1796 | | | 4 | 123193063 | 2/2 | 61 |
| RS1931991 | 2003 | | | 6 | 142639061 | 3/3 | 7 |
| RS261861 | 1550 | RGS7 | 6000 | 1 | 239162199 | 1/1 | 38 |
| RS1460176 | 2134 | | | 8 | 80409177 | 1/1 | 105 |
| RS10504744 | 2138 | | | 8 | 82952758 | 2/2 | 99 |
| RS10484407 | 1957 | | | 6 | 53086362 | 1/1 | 2 |
| RS4722207 | 2025 | DRCTNNB1A | 84668 | 7 | 22959312 | 1/1 | 27 |
| RS2009373 | 1415 | CARD8 | 22900 | 19 | 53411226 | 2/2 | 41 |
| RS10518901 | 2441 | C15orf41 | 84529 | 15 | 34807406 | 1/1 | 80 |
| RS173036 | 2449 | | | 15 | 58145519 | 2/2 | 231 |
| RS7718000 | 551 | | | 5 | 112998258 | 1/3 | 5 |
| RS10496647 | 202 | | | 2 | 126205406 | 1/1 | 1 |
| RS2374031 | 2368 | GPC5 | 2262 | 13 | 91939563 | 1/1 | 143 |
| RS10503066 | 2523 | PIGN | 23556 | 18 | 57976538 | 1/1 | 153 |
| RS4764277 | 2314 | | | 12 | 16577657 | 1/1 | 73 |
| RS6977649 | 2057 | | | 7 | 88161552 | 2/2 | 2 |
| RS1119006 | 2354 | | | 13 | 68718453 | 3/3 | 216 |
| RS2827082 | 1444 | | | 21 | 22119060 | 2/2 | 5 |
| RS185926 | 2531 | LOC401898 | 401898 | 19 | 11658252 | 1/1 | 1 |
| RS1434817 | 1732 | | | 4 | 43312247 | 1/1 | 1 |
| RS9313999 | 1890 | | | 5 | 163444569 | 2/2 | 63 |
| RS1011439 | 1339 | | | 17 | 49582464 | 1/1 | 1 |
| RS7706518 | 576 | | | 5 | 127308921 | 1/1 | 195 |
| RS2157768 | 1340 | | | 17 | 49582892 | 1/1 | 226 |
| RS718883 | 1490 | SLC44A5 | 204962 | 1 | 75837778 | 1/1 | 140 |
| RS6673693 | 1527 | | | 1 | 207790043 | 1/1 | 7 |
| RS889053 | 1888 | | | 5 | 159028256 | 1/1 | 11 |
| RS10498602 | 2424 | | | 14 | 85663057 | 2/4 | 16 |
| RS10483512 | 2402 | | | 14 | 39587177 | 2/2 | 80 |
| RS2362932 | 120 | SMYD3 | 64754 | 1 | 243980907 | 1/1 | 34 |
| RS1497504 | 1637 | | | 3 | 21018495 | 1/1 | 7 |
| RS10521241 | 1303 | | | 16 | 49914787 | 1/1 | 4 |
| RS1025748 | 438 | | | 4 | 154783347 | 1/1 | 148 |
| RS10484973 | 1966 | RIMS1 | 22999 | 6 | 72677020 | 2/2 | 14 |
| RS1374028 | 1825 | PDE4D | 5144 | 5 | 58611588 | 1/1 | 183 |
| RS2842527 | 1941 | ZFAND3 | 60685 | 6 | 38083679 | 1/1 | 86 |
| RS5979345 | 2577 | MID1 | 4281 | X | 10625012 | 1/1 | 227 |
| RS9312013 | 260 | | | 3 | 8299589 | 3/3 | 214 |
| RS10507607 | 2351 | | | 13 | 55507498 | 2/2 | 211 |
| RS10494826 | 98 | LOC647219 | 647219 | 1 | 199352619 | 2/2 | 11 |
| RS634785 | 1572 | SEC15L2 | 23233 | 2 | 72442508 | 2/2 | 208 |
| RS737911 | 2571 | MTMR3 | 8897 | 22 | 28729417 | 1/1 | 11 |
| RS4684321 | 256 | | | 3 | 1842614 | 1/1 | 218 |
| RS2175935 | 2139 | | | 8 | 83561779 | 3/3 | 175 |
| RS25937 | 1815 | CTNND2 | 1501 | 5 | 11556189 | 1/3 | 37 |
| RS10507118 | 1151 | TMEM16D | 121601 | 12 | 99744565 | 2/2 | 4 |
| RS2833581 | 2567 | HUNK | 30811 | 21 | 32254024 | 2/2 | 41 |
| RS10482871 | 1439 | | | 21 | 15700259 | 2/3 | 5 |
| RS4122274 | 1873 | | | 5 | 102998589 | 1/1 | 28 |
| RS10521316 | 2461 | | | 16 | 53286727 | 2/2 | 64 |
| RS6673237 | 1534 | LYST | 1130 | 1 | 234107752 | 1/1 | 167 |
| RS2409037 | 577 | | | 5 | 127314089 | 3/3 | 194 |
| RS10503069 | 2527 | KIAA1468 | 57614 | 18 | 58122956 | 1/1 | 152 |
| RS9784951 | 2041 | | | 7 | 45293270 | 1/1 | 129 |
| RS10501171 | 2249 | | | 11 | 37100583 | 2/2 | 88 |
| RS660274 | 2262 | | | 11 | 84482949 | 1/1 | 10 |
| RS10508378 | 961 | | | 10 | 10085297 | 2/2 | 1 |
| RS1386971 | 1632 | LRRN1 | 57633 | 3 | 3814711 | 2/2 | 234 |
| RS1153606 | 1639 | RARB | 5915 | 3 | 25549190 | 1/1 | 158 |
| RS1905015 | 1668 | | | 3 | 100210226 | 1/1 | 31 |
| RS10506168 | 2322 | MUC19 | 283463 | 12 | 39222063 | 1/1 | 153 |
| RS1409993 | 2578 | DGAT2L4 | 158835 | X | 69182937 | 2/2 | 113 |
| RS2131774 | 1468 | CSMD2 | 114784 | 1 | 33841310 | 1/1 | 6 |
| RS2831853 | 1449 | | | 21 | 28781867 | 2/2 | 227 |
| RS10515792 | 1889 | | | 5 | 159028460 | 2/2 | 145 |
| RS6902590 | 2008 | | | 6 | 148672183 | 1/1 | 114 |
| RS1904165 | 1824 | ITGA1 | 3672 | 5 | 52271559 | 1/1 | 3 |
| RS10487019 | 2056 | | | 7 | 87915131 | 2/2 | 2 |
| RS9310715 | 1638 | UBE2E2 | 7325 | 3 | 23228345 | 1/1 | 134 |
| RS1410364 | 1915 | | | 6 | 9837105 | 2/2 | 140 |
| RS1044045 | 1167 | EFHA1 | 221154 | 13 | 20965072 | 1/1 | 158 |
| RS5754499 | 2572 | | | 22 | 31978717 | 2/4 | 22 |
| RS3770899 | 163 | CRIM1 | 51232 | 2 | 36508276 | 1/1 | 1 |
| RS2241577 | 1898 | KIAA1191 | 57179 | 5 | 175707471 | 1/1 | 6 |
| RS10502543 | 2507 | | | 18 | 26284782 | 1/1 | 22 |
| RS10508405 | 2202 | | | 10 | 10608856 | 1/1 | 112 |
| RS6776797 | 1675 | LOC653584 | 653584 | 3 | 116136262 | 2/2 | 228 |
| RS7241410 | 2474 | C18orf1 | 753 | 18 | 13303263 | 2/2 | 22 |
| RS896043 | 2239 | | | 11 | 10303570 | 3/3 | 21 |
| RS397405 | 2413 | | | 14 | 45388652 | 2/4 | 22 |
| RS2054915 | 1089 | FLJ22104 | 65084 | 11 | 86668250 | 1/1 | 61 |
| RS32218 | 1876 | FBN2 | 2201 | 5 | 127719132 | 2/2 | 13 |
| RS10485828 | 2558 | TUBB1 | 81027 | 20 | 57034050 | 2/2 | 7 |
| RS10495390 | 116 | RYR2 | 6262 | 1 | 235379636 | 2/2 | 197 |
| RS7161975 | 2432 | SGNE1 | 6447 | 15 | 30755131 | 2/2 | 190 |
| RS10510156 | 1036 | | | 10 | 128294406 | 1/1 | 5 |
| RS615696 | 2508 | MBD2 | 8932 | 18 | 49946910 | 2/2 | 6 |
| RS10492136 | 2313 | GRIN2B | 2904 | 12 | 13803044 | 2/2 | 2 |
| RS1318822 | 1804 | PALLD | 23022 | 4 | 170001064 | 1/1 | 87 |
| RS823986 | 579 | FSTL4 | 23105 | 5 | 132894139 | 1/1 | 21 |
| RS924159 | 2583 | | | X | 122041921 | 2/2 | 164 |
| RS10508876 | 2207 | | | 10 | 43774192 | 2/2 | 205 |
| RS4935712 | 2218 | LOC653480 | 653480 | 10 | 51929419 | 2/2 | 65 |
| RS10497723 | 227 | TMEFF2 | 23671 | 2 | 192700568 | 1/1 | 207 |
| RS1063964 | 2053 | SRI | 6717 | 7 | 87673405 | 2/2 | 103 |
| RS2169141 | 2563 | NCAM2 | 4685 | 21 | 21756991 | 1/1 | 64 |
| RS10484846 | 1901 | | | 6 | 5048614 | 2/2 | 5 |
| RS10483541 | 2401 | TRAPPC6B | 122553 | 14 | 38708680 | 2/4 | 10 |
| RS9304675 | 2534 | CARD8 | 22900 | 19 | 53429261 | 2/2 | 96 |
| RS10508895 | 2209 | MARCH8 | 220972 | 10 | 45287774 | 1/1 | 2 |
| RS10494231 | 1505 | | | 1 | 120125842 | 2/2 | 54 |
| RS1944487 | 2261 | | | 11 | 79493829 | 1/1 | 63 |
| RS10503056 | 2521 | PIGN | 23556 | 18 | 57916617 | 2/2 | 151 |
| RS4578215 | 1475 | HIVEP3 | 59269 | 1 | 41836179 | 2/4 | 7 |
| RS1429130 | 432 | | | 4 | 148443213 | 1/1 | 202 |
| RS1915552 | 844 | | | 8 | 80237554 | 1/1 | 33 |
| RS724023 | 2372 | | | 14 | 24201300 | 1/1 | 208 |
| RS1993306 | 1555 | LTBP1 | 4052 | 2 | 33299839 | 1/1 | 11 |
| RS2593963 | 1673 | MORC1 | 27136 | 3 | 110188056 | 2/2 | 28 |
| RS10516142 | 601 | FLT4 | 2324 | 5 | 180003769 | 2/2 | 234 |
| RS8076457 | 1328 | NTN1 | 9423 | 17 | 8884654 | 2/2 | 163 |
| RS522085 | 1803 | | | 4 | 169481301 | 1/1 | 150 |
| RS7794555 | 754 | LOC653748 | 653748 | 7 | 153675164 | 2/2 | 207 |
| RS2014617 | 2102 | | | 8 | 27633311 | 2/2 | 137 |
| RS10495099 | 1533 | | | 1 | 216829548 | 2/2 | 3 |
| RS10516865 | 379 | | | 4 | 91324324 | 3/3 | 236 |
| RS935056 | 1506 | | | 1 | 120134921 | 2/2 | 54 |
| RS1376917 | 1649 | CADPS | 8618 | 3 | 62473418 | 2/4 | 18 |
| RS10498603 | 2425 | | | 14 | 85680709 | 2/3 | 17 |
| RS10511729 | 901 | | | 9 | 23547227 | 1/1 | 86 |
| RS9323026 | 2406 | | | 14 | 40050143 | 1/1 | 41 |
| RS2346593 | 1756 | | | 4 | 63606400 | 1/1 | 2 |
| RS10515985 | 2524 | KIAA1468 | 57614 | 18 | 58097923 | 2/2 | 143 |
| RS6966318 | 2060 | IFRD1 | 3475 | 7 | 111880093 | 2/2 | 110 |
| RS987479 | 714 | | | 7 | 34922949 | 1/1 | 147 |
| RS10506835 | 2332 | | | 12 | 79667966 | 2/2 | 22 |
| RS10504742 | 2137 | | | 8 | 82950922 | 1/1 | 99 |
| RS6134885 | 2540 | TASP1 | 55617 | 20 | 13421323 | 3/3 | 140 |
| RS4131870 | 1960 | | | 6 | 68549169 | 2/2 | 16 |
| RS4785953 | 2452 | ADCY9 | 115 | 16 | 4094852 | 1/1 | 184 |
| RS3847222 | 2184 | | | 9 | 1779931 | 1/1 | 128 |
| RS3874273 | 2434 | | | 15 | 34183438 | 1/1 | 96 |
| RS570008 | 2260 | | | 11 | 79479756 | 3/3 | 63 |
| RS745708 | 976 | FRMPD2 | 143162 | 10 | 49115681 | 1/1 | 146 |
| RS4984442 | 2451 | | | 15 | 93183231 | 1/1 | 127 |
| RS2973237 | 334 | | | 4 | 37148085 | 2/2 | 26 |
| RS10521007 | 1822 | ADAMTS12 | 81792 | 5 | 33794319 | 2/2 | 156 |
| RS10489117 | 1712 | | | 4 | 16754666 | 1/1 | 4 |
| RS581277 | 2247 | MPPED2 | 744 | 11 | 30436710 | 2/2 | 3 |
| RS10489115 | 1710 | | | 4 | 16736425 | 2/2 | 4 |
| RS162676 | 1857 | | | 5 | 98019403 | 2/2 | 17 |
| RS3789343 | 2541 | TASP1 | 55617 | 20 | 13446547 | 1/1 | 141 |
| RS918092 | 2306 | GRIN2B | 2904 | 12 | 13632070 | 3/3 | 152 |
| RS9303878 | 1360 | | | 18 | 1564764 | 1/1 | 193 |
| RS2078536 | 2026 | DRCTNNB1A | 84668 | 7 | 22983172 | 2/2 | 23 |
| RS2347061 | 1731 | | | 4 | 43232434 | 1/1 | 235 |
| RS9325124 | 1887 | | | 5 | 148229011 | 1/1 | 33 |
| RS972432 | 2098 | PSD3 | 23362 | 8 | 18599317 | 2/2 | 1 |
| RS2209426 | 2185 | SH3GL2 | 6456 | 9 | 17756315 | 1/1 | 145 |
| RS1526723 | 1665 | | | 3 | 74113598 | 2/2 | 31 |
| RS2041442 | 1711 | | | 4 | 16746993 | 2/2 | 183 |
| RS2357344 | 1242 | SYNE2 | 23224 | 14 | 63578006 | 2/2 | 5 |
| RS10514136 | 1849 | AP3B1 | 8546 | 5 | 77467642 | 1/1 | 170 |
| RS637225 | 1517 | | | 1 | 192302414 | 2/2 | 55 |
| RS3859990 | 2584 | FLJ30058 | 158763 | X | 130050135 | 1/1 | 209 |

| RS_id | avg1 | g2 | n2 | avg2 | g3 | n3 | avg3 | F | dft | dfe | P-value |
|---|---|---|---|---|---|---|---|---|---|---|---|
| RS6954679 | 1.31 | 1/3 | 35 | 1.42 | 3/3 | 3 | 2.03 | 16.76 | 2 | 236 | 1.56E−07 |
| RS2854946 | 1.67 | 2/3 | 64 | 1.31 | 3/3 | 128 | 1.3 | 15.76 | 2 | 202 | 4.36E−07 |
| RS10504433 | 1.31 | 2/4 | 50 | 1.39 | 4/4 | 1 | 2.5 | 14.53 | 2 | 238 | 1.11E−06 |
| RS1399503 | 1.32 | 3/4 | 39 | 1.32 | 4/4 | 2 | 2.21 | 14.04 | 2 | 235 | 1.74E−06 |
| RS10517155 | 2.5 | 2/4 | 49 | 1.28 | 4/4 | 191 | 1.34 | 13.57 | 2 | 238 | 2.62E−06 |
| RS10503626 | 2.15 | 1/3 | 17 | 1.43 | 3/3 | 221 | 1.32 | 13.54 | 2 | 237 | 2.70E−06 |
| RS1442799 | 1.32 | 2/4 | 30 | 1.38 | 4/4 | 1 | 2.5 | 12.89 | 2 | 238 | 4.84E−06 |
| RS3886738 | 2.5 | 1/3 | 34 | 1.37 | 3/3 | 201 | 1.32 | 12.85 | 2 | 233 | 5.08E−06 |
| RS10509160 | 2.5 | 2/3 | 38 | 1.37 | 3/3 | 202 | 1.32 | 12.79 | 2 | 238 | 5.30E−06 |
| RS10509161 | 2.5 | 1/3 | 33 | 1.38 | 3/3 | 203 | 1.32 | 12.67 | 2 | 234 | 5.96E−06 |
| RS10486467 | 2.5 | 1/3 | 9 | 1.25 | 3/3 | 228 | 1.33 | 12.6 | 2 | 235 | 6.34E−06 |
| RS2170398 | 2.5 | 2/4 | 40 | 1.36 | 4/4 | 199 | 1.32 | 12.53 | 2 | 237 | 6.72E−06 |
| RS10510995 | 2.5 | 1/3 | 12 | 1.4 | 3/3 | 223 | 1.33 | 12.37 | 2 | 233 | 7.84E−06 |
| RS718759 | 2.5 | 2/3 | 25 | 1.31 | 3/3 | 199 | 1.33 | 12.27 | 2 | 222 | 8.82E−06 |
| RS10498260 | 2.5 | 1/3 | 37 | 1.35 | 3/3 | 187 | 1.32 | 12.25 | 2 | 222 | 8.98E−06 |
| RS744832 | 2.5 | 1/3 | 51 | 1.33 | 3/3 | 186 | 1.32 | 12.16 | 2 | 235 | 9.44E−06 |
| RS10498321 | 1.33 | 1/2 | 56 | 1.34 | 2/2 | 1 | 2.5 | 12.16 | 2 | 235 | 9.44E−06 |
| RS2120650 | 1.33 | 1/3 | 24 | 1.35 | 3/3 | 1 | 2.5 | 12.15 | 2 | 238 | 9.45E−06 |
| RS4102401 | 2.5 | 2/4 | 18 | 1.36 | 4/4 | 221 | 1.33 | 12.13 | 2 | 237 | 9.65E−06 |
| RS352766 | 2.5 | 2/4 | 28 | 1.31 | 4/4 | 211 | 1.33 | 12.1 | 2 | 237 | 9.92E−06 |
| RS641445 | 2.5 | 3/4 | 21 | 1.31 | 4/4 | 191 | 1.33 | 12.16 | 2 | 210 | 1.01E−05 |
| RS10488888 | 2.5 | 2/4 | 6 | 1.37 | 4/4 | 233 | 1.33 | 12.08 | 2 | 237 | 1.01E−05 |
| RS1467596 | 2.5 | 1/3 | 12 | 1.35 | 3/3 | 226 | 1.33 | 12.07 | 2 | 236 | 1.02E−05 |
| RS2230133 | 1.33 | 2/3 | 42 | 1.32 | 3/3 | 1 | 2.5 | 12.06 | 2 | 237 | 1.03E−05 |
| RS10485909 | 1.33 | 2/4 | 19 | 1.32 | 4/4 | 1 | 2.5 | 11.99 | 2 | 236 | 1.10E−05 |
| RS4960221 | 1.33 | 2/4 | 59 | 1.33 | 4/4 | 1 | 2.5 | 11.98 | 2 | 236 | 1.11E−05 |
| RS10516418 | 1.33 | 1/3 | 26 | 1.33 | 3/3 | 1 | 2.5 | 11.91 | 2 | 230 | 1.20E−05 |
| RS10521381 | 1.44 | 4/4 | 142 | 1.27 | 0/0 | 0 | 0 | 19.94 | 1 | 200 | 1.33E−05 |
| RS470559 | 1.91 | 2/3 | 51 | 1.26 | 3/3 | 187 | 1.34 | 11.25 | 2 | 238 | 2.15E−05 |
| RS10511194 | 1.45 | 1/3 | 78 | 1.23 | 3/3 | 132 | 1.38 | 11.28 | 2 | 221 | 2.16E−05 |
| RS547008 | 2.04 | 1/3 | 36 | 1.4 | 3/3 | 194 | 1.31 | 11.26 | 2 | 229 | 2.17E−05 |
| RS10507768 | 1.56 | 3/3 | 211 | 1.31 | 0/0 | 0 | 0 | 18.68 | 1 | 228 | 2.31E−05 |
| RS10509929 | 1.9 | 2/3 | 49 | 1.4 | 3/3 | 178 | 1.31 | 11.18 | 2 | 227 | 2.34E−05 |
| RS7413158 | 1.78 | 1/2 | 61 | 1.3 | 2/2 | 174 | 1.33 | 10.97 | 2 | 238 | 2.77E−05 |
| RS1016579 | 1.79 | 1/3 | 23 | 1.52 | 3/3 | 188 | 1.31 | 10.85 | 2 | 209 | 3.29E−05 |
| RS3912653 | 1.24 | 1/3 | 113 | 1.3 | 3/3 | 83 | 1.43 | 10.59 | 2 | 235 | 3.95E−05 |
| RS2056247 | 1.64 | 3/4 | 77 | 1.39 | 4/4 | 157 | 1.29 | 10.47 | 2 | 238 | 4.38E−05 |
| RS10514614 | 1.31 | 1/3 | 32 | 1.5 | 3/3 | 2 | 1.06 | 10.46 | 2 | 236 | 4.44E−05 |
| RS10483457 | 1.32 | 1/3 | 29 | 1.38 | 3/3 | 2 | 2.07 | 10.32 | 2 | 237 | 5.04E−05 |
| RS387661 | 2.08 | 2/4 | 36 | 1.29 | 4/4 | 202 | 1.33 | 10.16 | 2 | 237 | 5.84E−05 |
| RS5923642 | 1.43 | 3/3 | 167 | 1.29 | 0/0 | 0 | 0 | 16.7 | 1 | 234 | 6.02E−05 |
| RS6811055 | 1.3 | 2/4 | 100 | 1.42 | 4/4 | 52 | 1.25 | 10.04 | 2 | 220 | 6.72E−05 |
| RS10513673 | 2.05 | 1/4 | 16 | 1.24 | 4/4 | 221 | 1.33 | 9.96 | 2 | 236 | 7.04E−05 |
| RS10498673 | 1.29 | 2/4 | 58 | 1.44 | 4/4 | 5 | 1.47 | 9.93 | 2 | 234 | 7.26E−05 |
| RS1867584 | 1.25 | 2/4 | 100 | 1.35 | 4/4 | 45 | 1.46 | 9.96 | 2 | 214 | 7.31E−05 |
| RS10502465 | 1.75 | 1/3 | 22 | 1.46 | 3/3 | 212 | 1.31 | 9.89 | 2 | 235 | 7.52E−05 |
| RS9299445 | 1.31 | 2/4 | 33 | 1.37 | 4/4 | 2 | 2.05 | 9.89 | 2 | 231 | 7.57E−05 |
| RS1792369 | 1.24 | 1/4 | 112 | 1.3 | 4/4 | 82 | 1.43 | 9.88 | 2 | 233 | 7.61E−05 |
| RS2889611 | 1.26 | 1/4 | 114 | 1.35 | 4/4 | 35 | 1.47 | 9.85 | 2 | 229 | 7.88E−05 |
| RS2101435 | 1.32 | 2/3 | 32 | 1.34 | 3/3 | 2 | 2.08 | 9.71 | 2 | 215 | 9.18E−05 |
| RS1112809 | 1.37 | 2/4 | 50 | 1.21 | 0/0 | 0 | 0 | 15.63 | 1 | 233 | 1.02E−04 |
| RS1528842 | 1.37 | 1/3 | 56 | 1.22 | 0/0 | 0 | 0 | 15.56 | 1 | 239 | 1.05E−04 |
| RS10493822 | 1.79 | 2/4 | 55 | 1.31 | 4/4 | 181 | 1.33 | 9.49 | 2 | 238 | 1.08E−04 |
| RS10508901 | 1.26 | 3/4 | 121 | 1.34 | 4/4 | 32 | 1.47 | 9.32 | 2 | 233 | 1.28E−04 |
| RS10491954 | 1.54 | 1/3 | 78 | 1.27 | 3/3 | 143 | 1.34 | 9.31 | 2 | 235 | 1.29E−04 |
| RS9299446 | 2.05 | 1/2 | 36 | 1.36 | 2/2 | 203 | 1.32 | 9.27 | 2 | 238 | 1.33E−04 |
| RS1073939 | 1.34 | 1/3 | 80 | 1.27 | 3/3 | 16 | 1.56 | 9.27 | 2 | 236 | 1.33E−04 |
| RS4352250 | 1.35 | 2/4 | 53 | 1.24 | 4/4 | 5 | 1.68 | 9.26 | 2 | 220 | 1.38E−04 |
| RS1961544 | 1.31 | 2/3 | 24 | 1.52 | 0/0 | 0 | 0 | 15.08 | 1 | 211 | 1.38E−04 |
| RS1810113 | 1.27 | 2/4 | 87 | 1.42 | 4/4 | 34 | 1.35 | 9.22 | 2 | 236 | 1.39E−04 |
| RS548987 | 1.31 | 2/3 | 32 | 1.42 | 3/3 | 1 | 2.21 | 9.21 | 2 | 235 | 1.41E−04 |
| RS2072506 | 1.31 | 1/4 | 30 | 1.5 | 0/0 | 0 | 0 | 14.97 | 1 | 234 | 1.42E−04 |
| RS2899901 | 1.34 | 1/3 | 113 | 1.38 | 3/3 | 51 | 1.21 | 9.2 | 2 | 235 | 1.42E−04 |
| RS4341948 | 1.68 | 2/4 | 64 | 1.25 | 4/4 | 171 | 1.35 | 9.08 | 2 | 237 | 1.59E−04 |
| RS9317744 | 1.61 | 4/4 | 211 | 1.32 | 0/0 | 0 | 0 | 14.77 | 1 | 220 | 1.59E−04 |
| RS1410126 | 1.74 | 1/2 | 58 | 1.27 | 2/2 | 174 | 1.34 | 9.01 | 2 | 234 | 1.70E−04 |
| RS10498293 | 1.62 | 1/3 | 51 | 1.41 | 3/3 | 183 | 1.3 | 8.99 | 2 | 238 | 1.72E−04 |
| RS10485110 | 1.74 | 3/4 | 69 | 1.33 | 4/4 | 163 | 1.32 | 8.98 | 2 | 235 | 1.75E−04 |
| RS2235216 | 1.74 | 1/3 | 71 | 1.33 | 3/3 | 142 | 1.32 | 8.97 | 2 | 216 | 1.81E−04 |
| RS10485864 | 1.32 | 2/3 | 49 | 1.35 | 3/3 | 4 | 1.83 | 8.94 | 2 | 231 | 1.82E−04 |
| RS10509119 | 1.34 | 1/3 | 45 | 1.28 | 3/3 | 2 | 2.01 | 8.87 | 2 | 238 | 1.93E−04 |
| RS4128928 | 1.47 | 2/3 | 120 | 1.34 | 3/3 | 84 | 1.27 | 8.84 | 2 | 237 | 1.98E−04 |
| RS2383024 | 1.27 | 1/2 | 99 | 1.41 | 2/2 | 35 | 1.29 | 8.83 | 2 | 232 | 2.01E−04 |
| RS10497298 | 1.68 | 1/3 | 63 | 1.26 | 3/3 | 163 | 1.35 | 8.83 | 2 | 228 | 2.03E−04 |
| RS166861 | 1.31 | 1/3 | 48 | 1.39 | 3/3 | 3 | 1.85 | 8.81 | 2 | 237 | 2.04E−04 |
| RS1324088 | 1.31 | 2/4 | 34 | 1.41 | 4/4 | 1 | 2.21 | 8.77 | 2 | 237 | 2.12E−04 |
| RS10516125 | 1.65 | 4/4 | 233 | 1.32 | 0/0 | 0 | 0 | 14.13 | 1 | 239 | 2.15E−04 |
| RS10497295 | 1.68 | 3/4 | 64 | 1.26 | 4/4 | 171 | 1.35 | 8.73 | 2 | 237 | 2.20E−04 |
| RS295577 | 1.93 | 2/3 | 9 | 1.49 | 3/3 | 223 | 1.32 | 8.73 | 2 | 231 | 2.21E−04 |
| RS10493425 | 1.33 | 1/2 | 13 | 1.23 | 2/2 | 2 | 1.98 | 8.74 | 2 | 219 | 2.23E−04 |
| RS10501797 | 1.24 | 2/3 | 118 | 1.3 | 3/3 | 90 | 1.41 | 8.7 | 2 | 237 | 2.26E−04 |
| RS6702277 | 1.5 | 1/3 | 103 | 1.27 | 3/3 | 114 | 1.35 | 8.7 | 2 | 233 | 2.27E−04 |
| RS4368350 | 1.79 | 2/4 | 36 | 1.26 | 4/4 | 173 | 1.35 | 8.73 | 2 | 210 | 2.28E−04 |
| RS10514009 | 1.49 | 4/4 | 209 | 1.31 | 0/0 | 0 | 0 | 13.93 | 1 | 238 | 2.37E−04 |
| RS1282646 | 1.34 | 1/4 | 33 | 1.24 | 4/4 | 2 | 1.94 | 8.63 | 2 | 236 | 2.41E−04 |
| RS1902049 | 1.31 | 3/4 | 90 | 1.3 | 4/4 | 18 | 1.55 | 8.62 | 2 | 234 | 2.44E−04 |
| RS1380835 | 1.34 | 3/4 | 62 | 1.28 | 4/4 | 3 | 1.85 | 8.59 | 2 | 238 | 2.50E−04 |
| RS2255565 | 1.33 | 1/2 | 53 | 1.31 | 2/2 | 4 | 1.83 | 8.57 | 2 | 238 | 2.55E−04 |
| RS2793207 | 1.32 | 1/3 | 17 | 1.55 | 0/0 | 0 | 0 | 13.76 | 1 | 230 | 2.60E−04 |
| RS10503573 | 1.32 | 1/2 | 14 | 1.57 | 0/0 | 0 | 0 | 13.74 | 1 | 239 | 2.61E−04 |
| RS10521382 | 1.44 | 2/2 | 149 | 1.3 | 0/0 | 0 | 0 | 13.75 | 1 | 209 | 2.68E−04 |
| RS2113515 | 1.33 | 2/4 | 55 | 1.32 | 4/4 | 4 | 1.83 | 8.46 | 2 | 236 | 2.83E−04 |
| RS692419 | 1.3 | 2/4 | 120 | 1.39 | 4/4 | 54 | 1.24 | 8.45 | 2 | 235 | 2.86E−04 |
| RS10484066 | 1.35 | 1/2 | 76 | 1.26 | 2/2 | 22 | 1.49 | 8.43 | 2 | 228 | 2.94E−04 |
| RS1329120 | 1.7 | 1/3 | 60 | 1.3 | 3/3 | 172 | 1.33 | 8.4 | 2 | 236 | 2.99E−04 |
| RS1406444 | 1.36 | 1/2 | 53 | 1.23 | 0/0 | 0 | 0 | 13.38 | 1 | 237 | 3.13E−04 |
| RS10504166 | 1.78 | 1/2 | 57 | 1.37 | 2/2 | 171 | 1.31 | 8.35 | 2 | 229 | 3.16E−04 |
| RS572241 | 1.25 | 2/4 | 113 | 1.35 | 4/4 | 43 | 1.43 | 8.29 | 2 | 231 | 3.33E−04 |
| RS1945011 | 1.32 | 1/3 | 75 | 1.24 | 3/3 | 160 | 1.37 | 8.23 | 2 | 236 | 3.51E−04 |
| RS536617 | 1.25 | 2/4 | 118 | 1.35 | 4/4 | 42 | 1.43 | 8.22 | 2 | 237 | 3.54E−04 |
| RS8068574 | 1.33 | 1/3 | 78 | 1.31 | 3/3 | 13 | 1.6 | 8.21 | 2 | 234 | 3.58E−04 |
| RS10487012 | 1.3 | 2/4 | 74 | 1.41 | 4/4 | 6 | 1.07 | 8.21 | 2 | 231 | 3.59E−04 |
| RS866651 | 1.32 | 2/3 | 69 | 1.31 | 3/3 | 10 | 1.64 | 8.2 | 2 | 237 | 3.60E−04 |
| RS3760626 | 1.26 | 1/3 | 130 | 1.33 | 3/3 | 43 | 1.45 | 8.18 | 2 | 236 | 3.67E−04 |
| RS10491855 | 1.51 | 2/3 | 89 | 1.37 | 3/3 | 129 | 1.29 | 8.15 | 2 | 232 | 3.80E−04 |
| RS2099803 | 1.31 | 1/4 | 124 | 1.39 | 4/4 | 66 | 1.24 | 8.11 | 2 | 235 | 3.93E−04 |
| RS1509649 | 1.68 | 2/4 | 58 | 1.26 | 4/4 | 169 | 1.35 | 8.1 | 2 | 229 | 3.99E−04 |
| RS10489249 | 1.33 | 2/3 | 61 | 1.3 | 3/3 | 5 | 1.75 | 8.05 | 2 | 238 | 4.14E−04 |
| RS877345 | 1.32 | 1/2 | 39 | 1.35 | 2/2 | 3 | 1.9 | 8.06 | 2 | 219 | 4.19E−04 |
| RS3116231 | 1.96 | 2/3 | 48 | 1.38 | 3/3 | 189 | 1.31 | 8.01 | 2 | 236 | 4.31E−04 |
| RS950206 | 1.29 | 2/4 | 111 | 1.28 | 4/4 | 93 | 1.41 | 7.97 | 2 | 235 | 4.48E−04 |
| RS1828384 | 1.38 | 2/4 | 128 | 1.37 | 4/4 | 60 | 1.23 | 7.95 | 2 | 236 | 4.56E−04 |
| RS10495074 | 1.27 | 2/4 | 122 | 1.34 | 4/4 | 31 | 1.48 | 7.94 | 2 | 237 | 4.60E−04 |
| RS10483507 | 1.22 | 1/4 | 112 | 1.38 | 4/4 | 74 | 1.34 | 7.94 | 2 | 236 | 4.60E−04 |
| RS7792197 | 1.78 | 1/3 | 24 | 1.39 | 3/3 | 211 | 1.32 | 7.91 | 2 | 236 | 4.73E−04 |
| RS7412987 | 1.48 | 2/4 | 101 | 1.34 | 4/4 | 88 | 1.27 | 7.93 | 2 | 217 | 4.74E−04 |
| RS6838 | 1.48 | 1/4 | 122 | 1.29 | 4/4 | 75 | 1.33 | 7.91 | 2 | 230 | 4.76E−04 |
| RS950085 | 1.47 | 1/4 | 91 | 1.32 | 4/4 | 54 | 1.25 | 8 | 2 | 166 | 4.82E−04 |
| RS1919447 | 1.37 | 2/4 | 52 | 1.23 | 0/0 | 0 | 0 | 12.5 | 1 | 234 | 4.90E−04 |
| RS12026256 | 1.34 | 1/3 | 38 | 1.27 | 3/3 | 1 | 2.21 | 7.91 | 2 | 190 | 5.02E−04 |
| RS283063 | 1.47 | 4/4 | 204 | 1.31 | 0/0 | 0 | 0 | 12.43 | 1 | 238 | 5.07E−04 |
| RS1456196 | 1.61 | 1/2 | 76 | 1.39 | 2/2 | 141 | 1.29 | 7.85 | 2 | 218 | 5.10E−04 |
| RS4516081 | 1.29 | 2/4 | 68 | 1.43 | 4/4 | 33 | 1.28 | 7.87 | 2 | 203 | 5.11E−04 |
| RS10498032 | 1.17 | 1/4 | 100 | 1.37 | 4/4 | 80 | 1.34 | 7.83 | 2 | 206 | 5.28E−04 |
| RS8049647 | 1.32 | 1/3 | 71 | 1.33 | 3/3 | 6 | 1.72 | 7.76 | 2 | 237 | 5.44E−04 |
| RS10485435 | 1.53 | 1/2 | 102 | 1.3 | 2/2 | 113 | 1.32 | 7.74 | 2 | 233 | 5.57E−04 |
| RS10503419 | 1.31 | 1/2 | 68 | 1.36 | 2/2 | 4 | 1.77 | 7.73 | 2 | 219 | 5.70E−04 |
| RS10484065 | 1.35 | 1/2 | 74 | 1.26 | 2/2 | 22 | 1.49 | 7.71 | 2 | 227 | 5.76E−04 |
| RS10495783 | 1.45 | 2/4 | 128 | 1.29 | 4/4 | 62 | 1.33 | 7.7 | 2 | 235 | 5.77E−04 |
| RS6919514 | 1.45 | 4/4 | 199 | 1.31 | 0/0 | 0 | 0 | 12.17 | 1 | 238 | 5.78E−04 |
| RS10489251 | 1.75 | 3/4 | 57 | 1.31 | 4/4 | 175 | 1.33 | 7.67 | 2 | 234 | 5.94E−04 |
| RS1372184 | 1.3 | 3/4 | 71 | 1.43 | 4/4 | 4 | 1.26 | 7.68 | 2 | 219 | 5.98E−04 |
| RS10485116 | 1.61 | 4/4 | 229 | 1.32 | 0/0 | 0 | 0 | 12.09 | 1 | 236 | 6.03E−04 |
| RS250387 | 1.29 | 1/3 | 63 | 1.43 | 3/3 | 7 | 1.42 | 7.65 | 2 | 235 | 6.04E−04 |
| RS817504 | 1.29 | 3/4 | 40 | 1.45 | 4/4 | 9 | 1.35 | 7.69 | 2 | 198 | 6.08E−04 |
| RS1407390 | 1.32 | 2/4 | 72 | 1.32 | 4/4 | 3 | 1.87 | 7.64 | 2 | 237 | 6.09E−04 |
| RS9308931 | 1.35 | 1/2 | 105 | 1.28 | 2/2 | 48 | 1.45 | 7.66 | 2 | 211 | 6.15E−04 |
| RS1884772 | 1.22 | 2/4 | 112 | 1.38 | 4/4 | 72 | 1.34 | 7.62 | 2 | 235 | 6.22E−04 |
| RS227521 | 1.34 | 1/3 | 43 | 1.28 | 3/3 | 1 | 2.21 | 7.62 | 2 | 232 | 6.23E−04 |
| RS2353296 | 1.89 | 1/2 | 29 | 1.47 | 2/2 | 197 | 1.31 | 7.6 | 2 | 224 | 6.41E−04 |
| RS10241173 | 1.32 | 1/3 | 54 | 1.35 | 3/3 | 1 | 2.21 | 7.61 | 2 | 214 | 6.42E−04 |
| RS10508896 | 1.35 | 1/3 | 25 | 1.17 | 3/3 | 2 | 1.11 | 7.58 | 2 | 237 | 6.44E−04 |
| RS2292889 | 1.2 | 2/3 | 78 | 1.26 | 3/3 | 150 | 1.38 | 7.57 | 2 | 233 | 6.53E−04 |
| RS10486853 | 1.31 | 2/4 | 41 | 1.4 | 4/4 | 2 | 1.9 | 7.57 | 2 | 229 | 6.55E−04 |
| RS1559751 | 1.33 | 1/3 | 105 | 1.29 | 3/3 | 31 | 1.49 | 7.56 | 2 | 238 | 6.56E−04 |
| RS10484317 | 1.32 | 2/3 | 18 | 1.37 | 3/3 | 2 | 1.98 | 7.56 | 2 | 234 | 6.58E−04 |
| RS896990 | 1.96 | 1/2 | 41 | 1.38 | 2/2 | 191 | 1.32 | 7.56 | 2 | 231 | 6.60E−04 |
| RS965193 | 1.34 | 3/4 | 74 | 1.29 | 4/4 | 6 | 1.69 | 7.54 | 2 | 238 | 6.68E−04 |
| RS7850478 | 1.51 | 1/3 | 92 | 1.36 | 3/3 | 132 | 1.29 | 7.54 | 2 | 238 | 6.68E−04 |
| RS6492611 | 1.58 | 1/3 | 75 | 1.33 | 3/3 | 142 | 1.32 | 7.55 | 2 | 228 | 6.68E−04 |
| RS492681 | 1.39 | 2/4 | 65 | 1.43 | 4/4 | 159 | 1.29 | 7.53 | 2 | 233 | 6.78E−04 |
| RS1029233 | 1.24 | 1/2 | 84 | 1.41 | 2/2 | 131 | 1.3 | 7.51 | 2 | 235 | 6.89E−04 |
| RS487707 | 1.29 | 1/3 | 102 | 1.4 | 3/3 | 21 | 1.24 | 7.5 | 2 | 236 | 6.95E−04 |
| RS1427421 | 1.39 | 1/3 | 38 | 1.47 | 3/3 | 186 | 1.3 | 7.51 | 2 | 224 | 6.97E−04 |
| RS10520892 | 1.32 | 2/4 | 39 | 1.33 | 4/4 | 3 | 1.87 | 7.48 | 2 | 236 | 7.08E−04 |
| RS10484921 | 1.4 | 1/2 | 83 | 1.25 | 2/2 | 115 | 1.38 | 7.5 | 2 | 217 | 7.09E−04 |
| RS1880438 | 1.3 | 2/4 | 94 | 1.41 | 4/4 | 30 | 1.24 | 7.48 | 2 | 228 | 7.14E−04 |
| RS945849 | 1.33 | 1/3 | 76 | 1.32 | 3/3 | 3 | 1.87 | 7.47 | 2 | 237 | 7.14E−04 |
| RS10518821 | 1.34 | 1/3 | 80 | 1.3 | 3/3 | 6 | 1.69 | 7.47 | 2 | 237 | 7.14E−04 |
| RS352427 | 1.32 | 1/3 | 13 | 1.57 | 3/3 | 1 | 1.6 | 7.44 | 2 | 237 | 7.35E−04 |
| RS768747 | 1.3 | 2/4 | 63 | 1.43 | 4/4 | 8 | 1.18 | 7.43 | 2 | 235 | 7.43E−04 |
| RS295525 | 1.93 | 2/4 | 8 | 1.47 | 4/4 | 231 | 1.32 | 7.42 | 2 | 238 | 7.48E−04 |
| RS10517836 | 1.31 | 2/4 | 33 | 1.41 | 4/4 | 6 | 1.64 | 7.43 | 2 | 222 | 7.53E−04 |
| RS6477845 | 1.87 | 1/3 | 71 | 1.32 | 3/3 | 165 | 1.32 | 7.41 | 2 | 236 | 7.57E−04 |
| RS7874576 | 1.74 | 3/3 | 233 | 1.33 | 0/0 | 0 | 0 | 11.64 | 1 | 235 | 7.60E−04 |
| RS823638 | 1.87 | 1/3 | 57 | 1.34 | 3/3 | 155 | 1.32 | 7.43 | 2 | 212 | 7.61E−04 |
| RS1387551 | 2.21 | 2/4 | 27 | 1.39 | 4/4 | 206 | 1.32 | 7.39 | 2 | 231 | 7.75E−04 |
| RS962592 | 1.32 | 2/4 | 6 | 1.67 | 0/0 | 0 | 0 | 11.57 | 1 | 238 | 7.86E−04 |
| RS10500985 | 1.66 | 1/2 | 71 | 1.35 | 2/2 | 141 | 1.3 | 7.39 | 2 | 215 | 7.87E−04 |
| RS7470491 | 1.33 | 2/4 | 74 | 1.32 | 4/4 | 3 | 1.87 | 7.36 | 2 | 235 | 7.94E−04 |
| RS9294812 | 1.32 | 2/3 | 90 | 1.31 | 3/3 | 21 | 1.53 | 7.36 | 2 | 223 | 8.03E−04 |
| RS7719212 | 1.32 | 2/3 | 16 | 1.41 | 3/3 | 1 | 2.21 | 7.34 | 2 | 236 | 8.08E−04 |
| RS2291386 | 1.31 | 2/4 | 26 | 1.49 | 0/0 | 0 | 0 | 11.5 | 1 | 239 | 8.14E−04 |
| RS10498292 | 1.29 | 1/3 | 67 | 1.42 | 3/3 | 9 | 1.42 | 7.3 | 2 | 238 | 8.38E−04 |
| RS10494066 | 1.71 | 2/4 | 82 | 1.32 | 4/4 | 150 | 1.33 | 7.3 | 2 | 235 | 8.40E−04 |
| RS9303347 | 1 | 1/3 | 13 | 1.57 | 3/3 | 221 | 1.32 | 7.28 | 2 | 232 | 8.58E−04 |
| RS10521202 | 1.45 | 2/4 | 94 | 1.29 | 4/4 | 70 | 1.31 | 7.3 | 2 | 213 | 8.58E−04 |
| RS700049 | 1.87 | 1/2 | 74 | 1.33 | 2/2 | 157 | 1.33 | 7.26 | 2 | 231 | 8.75E−04 |
| RS9304301 | 1.33 | 2/4 | 19 | 1.26 | 4/4 | 1 | 2.21 | 7.25 | 2 | 234 | 8.81E−04 |
| RS718153 | 1.5 | 1/3 | 110 | 1.31 | 3/3 | 100 | 1.31 | 7.25 | 2 | 233 | 8.82E−04 |
| RS1893120 | 1.24 | 2/4 | 80 | 1.29 | 4/4 | 89 | 1.4 | 7.29 | 2 | 197 | 8.82E−04 |
| RS10500668 | 2.21 | 2/4 | 27 | 1.28 | 4/4 | 213 | 1.34 | 7.23 | 2 | 238 | 8.95E−04 |
| RS10497650 | 1.69 | 4/4 | 223 | 1.32 | 0/0 | 0 | 0 | 11.33 | 1 | 226 | 8.96E−04 |
| RS878016 | 1.3 | 1/2 | 81 | 1.34 | 2/2 | 29 | 1.49 | 7.21 | 2 | 237 | 9.13E−04 |
| RS2474263 | 1.23 | 3/4 | 106 | 1.3 | 4/4 | 98 | 1.4 | 7.2 | 2 | 234 | 9.24E−04 |
| RS10518533 | 1.78 | 1/2 | 100 | 1.31 | 2/2 | 122 | 1.33 | 7.2 | 2 | 233 | 9.33E−04 |
| RS1566728 | 1.29 | 1/3 | 94 | 1.41 | 3/3 | 14 | 1.25 | 7.18 | 2 | 237 | 9.39E−04 |
| RS7841198 | 1.79 | 2/3 | 29 | 1.47 | 3/3 | 209 | 1.31 | 7.18 | 2 | 236 | 9.40E−04 |
| RS3827702 | 1.3 | 2/4 | 60 | 1.34 | 4/4 | 19 | 1.53 | 7.22 | 2 | 196 | 9.43E−04 |
| RS901682 | 1.11 | 1/3 | 21 | 1.16 | 3/3 | 214 | 1.35 | 7.15 | 2 | 234 | 9.68E−04 |
| RS10490353 | 1.33 | 2/3 | 43 | 1.3 | 3/3 | 2 | 1.96 | 7.11 | 2 | 238 | 1.00E−03 |
| RS246558 | 1.31 | 1/3 | 61 | 1.36 | 3/3 | 5 | 1.72 | 7.11 | 2 | 236 | 1.00E−03 |
| RS10513993 | 2.21 | 3/4 | 26 | 1.28 | 4/4 | 212 | 1.34 | 7.11 | 2 | 236 | 1.00E−03 |
| RS8027192 | 1.7 | 2/4 | 64 | 1.3 | 4/4 | 170 | 1.33 | 7.1 | 2 | 237 | 1.01E−03 |
| RS9327673 | 1.52 | 1/3 | 95 | 1.31 | 3/3 | 125 | 1.32 | 7.09 | 2 | 238 | 1.02E−03 |
| RS7107851 | 1.29 | 2/3 | 81 | 1.39 | 3/3 | 6 | 1.57 | 7.08 | 2 | 238 | 1.03E−03 |
| RS6798797 | 1.32 | 1/3 | 14 | 1.36 | 3/3 | 2 | 1.97 | 7.08 | 2 | 233 | 1.04E−04 |
| RS2369669 | 1.33 | 1/3 | 65 | 1.28 | 3/3 | 33 | 1.48 | 7.09 | 2 | 208 | 1.05E−03 |
| RS967326 | 1.31 | 2/4 | 30 | 1.47 | 4/4 | 1 | 1.79 | 7.06 | 2 | 237 | 1.05E−03 |
| RS10484518 | 1.34 | 3/4 | 100 | 1.4 | 4/4 | 111 | 1.27 | 7.05 | 2 | 231 | 1.07E−03 |
| RS10521979 | 1.45 | 4/4 | 198 | 1.31 | 0/0 | 0 | 0 | 10.97 | 1 | 237 | 1.07E−03 |
| RS965158 | 1.57 | 4/4 | 230 | 1.32 | 0/0 | 0 | 0 | 10.95 | 1 | 239 | 1.08E−03 |
| RS2294311 | 1.37 | 1/3 | 89 | 1.4 | 3/3 | 134 | 1.28 | 7 | 2 | 236 | 1.11E−03 |
| RS10497649 | 1.63 | 3/3 | 234 | 1.32 | 0/0 | 0 | 0 | 10.88 | 1 | 239 | 1.12E−03 |
| RS1217654 | 1.34 | 2/4 | 36 | 1.3 | 4/4 | 1 | 2.21 | 7 | 2 | 228 | 1.12E−03 |
| RS1773409 | 1.65 | 1/3 | 47 | 1.26 | 3/3 | 188 | 1.34 | 6.99 | 2 | 238 | 1.12E−03 |
| RS9323682 | 1.21 | 1/3 | 36 | 1.47 | 3/3 | 200 | 1.31 | 6.99 | 2 | 235 | 1.12E−03 |
| RS2503102 | 1.4 | 1/3 | 74 | 1.3 | 3/3 | 34 | 1.24 | 7.02 | 2 | 204 | 1.13E−03 |
| RS3745718 | 1.4 | 1/3 | 122 | 1.27 | 3/3 | 45 | 1.39 | 6.98 | 2 | 238 | 1.13E−03 |
| RS370480 | 1.51 | 3/4 | 110 | 1.33 | 4/4 | 109 | 1.3 | 6.97 | 2 | 238 | 1.14E−03 |
| RS1217656 | 2.21 | 1/2 | 38 | 1.29 | 2/2 | 200 | 1.34 | 6.97 | 2 | 236 | 1.15E−03 |
| RS10510715 | 1.97 | 2/4 | 8 | 1.28 | 4/4 | 230 | 1.33 | 6.93 | 2 | 237 | 1.19E−03 |
| RS4510935 | 1.66 | 2/4 | 60 | 1.37 | 4/4 | 174 | 1.31 | 6.93 | 2 | 237 | 1.19E−03 |
| RS2064572 | 1.3 | 1/3 | 100 | 1.41 | 3/3 | 50 | 1.26 | 6.95 | 2 | 213 | 1.19E−03 |
| RS10486848 | 1.32 | 2/4 | 61 | 1.32 | 4/4 | 11 | 1.6 | 6.93 | 2 | 234 | 1.19E−03 |
| RS10515869 | 1.44 | 1/3 | 119 | 1.29 | 3/3 | 69 | 1.33 | 6.91 | 2 | 234 | 1.21E−03 |
| RS10499436 | 1.45 | 1/3 | 85 | 1.38 | 3/3 | 126 | 1.28 | 6.91 | 2 | 227 | 1.22E−03 |
| RS10510714 | 1.33 | 1/3 | 15 | 1.35 | 3/3 | 2 | 1.97 | 6.9 | 2 | 238 | 1.22E−03 |
| RS724620 | 1.25 | 4/4 | 148 | 1.37 | 0/0 | 0 | 0 | 10.72 | 1 | 218 | 1.23E−03 |
| RS6109935 | 1.52 | 2/4 | 82 | 1.34 | 4/4 | 117 | 1.3 | 6.9 | 2 | 215 | 1.25E−03 |
| RS10521613 | 1.56 | 4/4 | 228 | 1.32 | 0/0 | 0 | 0 | 10.66 | 1 | 238 | 1.26E−03 |
| RS10505439 | 2.21 | 1/3 | 28 | 1.36 | 3/3 | 212 | 1.32 | 6.87 | 2 | 238 | 1.26E−03 |
| RS2045765 | 1.31 | 2/4 | 43 | 1.4 | 4/4 | 7 | 1.6 | 6.86 | 2 | 236 | 1.27E−03 |
| RS10512041 | 2.21 | 2/4 | 53 | 1.3 | 4/4 | 185 | 1.34 | 6.86 | 2 | 236 | 1.27E−03 |
| RS10504143 | 1.51 | 4/4 | 213 | 1.32 | 0/0 | 0 | 0 | 10.64 | 1 | 231 | 1.27E−03 |
| RS6079097 | 1.52 | 1/3 | 103 | 1.33 | 3/3 | 117 | 1.3 | 6.85 | 2 | 235 | 1.28E−03 |
| RS10494583 | 1.3 | 2/3 | 81 | 1.36 | 3/3 | 7 | 1.63 | 6.84 | 2 | 237 | 1.29E−03 |
| RS1527420 | 1.31 | 1/2 | 43 | 1.36 | 2/2 | 5 | 1.71 | 6.85 | 2 | 221 | 1.30E−03 |
| RS3218493 | 1.58 | 3/3 | 230 | 1.32 | 0/0 | 0 | 0 | 10.58 | 1 | 238 | 1.31E−03 |
| RS10499437 | 1.45 | 1/3 | 92 | 1.37 | 3/3 | 125 | 1.28 | 6.83 | 2 | 233 | 1.31E−03 |
| RS10512980 | 1.25 | 1/3 | 99 | 1.29 | 3/3 | 110 | 1.4 | 6.83 | 2 | 232 | 1.31E−03 |
| RS10485441 | 1.88 | 1/3 | 40 | 1.39 | 3/3 | 196 | 1.31 | 6.82 | 2 | 235 | 1.32E−04 |
| RS10509448 | 1.31 | 2/4 | 15 | 1.55 | 4/4 | 2 | 1.5 | 6.83 | 2 | 222 | 1.32E−03 |
| RS32967 | 1.31 | 2/3 | 88 | 1.26 | 3/3 | 132 | 1.38 | 6.82 | 2 | 232 | 1.32E−03 |
| RS2371319 | 1.97 | 2/4 | 18 | 1.33 | 4/4 | 221 | 1.33 | 6.8 | 2 | 238 | 1.34E−03 |
| RS10496649 | 1.35 | 2/4 | 38 | 1.24 | 4/4 | 1 | 1.96 | 6.8 | 2 | 236 | 1.35E−03 |
| RS1462478 | 1.31 | 2/4 | 15 | 1.3 | 4/4 | 3 | 1.82 | 6.9 | 2 | 153 | 1.35E−03 |
| RS773013 | 1.59 | 4/4 | 225 | 1.32 | 0/0 | 0 | 0 | 10.52 | 1 | 232 | 1.35E−03 |
| RS6830598 | 1.46 | 2/3 | 91 | 1.34 | 3/3 | 84 | 1.28 | 6.81 | 2 | 207 | 1.37E−03 |
| RS1959715 | 2.21 | 1/3 | 7 | 1.28 | 3/3 | 228 | 1.33 | 6.78 | 2 | 233 | 1.37E−03 |
| RS2111368 | 1.3 | 1/4 | 65 | 1.4 | 4/4 | 1 | 1.83 | 6.77 | 2 | 231 | 1.39E−03 |
| RS965788 | 1.24 | 1/3 | 47 | 1.45 | 3/3 | 175 | 1.31 | 6.77 | 2 | 230 | 1.39E−03 |
| RS4564209 | 1.28 | 2/4 | 118 | 1.34 | 4/4 | 25 | 1.48 | 6.75 | 2 | 237 | 1.41E−03 |
| RS1889465 | 1.31 | 1/3 | 32 | 1.47 | 0/0 | 0 | 0 | 10.42 | 1 | 236 | 1.42E−03 |
| RS10485490 | 1.33 | 2/4 | 17 | 1.29 | 4/4 | 1 | 2.21 | 6.72 | 2 | 234 | 1.45E−03 |
| RS6735220 | 1.33 | 2/4 | 39 | 1.29 | 4/4 | 2 | 1.94 | 6.71 | 2 | 238 | 1.46E−03 |
| RS1427422 | 1.39 | 2/4 | 40 | 1.46 | 4/4 | 196 | 1.31 | 6.71 | 2 | 236 | 1.46E−03 |
| RS245340 | 1.31 | 3/4 | 94 | 1.26 | 4/4 | 131 | 1.39 | 6.7 | 2 | 237 | 1.48E−03 |
| RS4131462 | 1.39 | 2/4 | 107 | 1.32 | 4/4 | 32 | 1.21 | 6.7 | 2 | 237 | 1.48E−03 |
| RS207616 | 1.38 | 1/2 | 110 | 1.27 | 2/2 | 10 | 1.45 | 6.72 | 2 | 214 | 1.48E−03 |
| RS672489 | 1.26 | 2/4 | 104 | 1.38 | 4/4 | 30 | 1.4 | 6.7 | 2 | 224 | 1.49E−03 |
| RS7829473 | 1.33 | 2/4 | 80 | 1.3 | 4/4 | 17 | 1.54 | 6.68 | 2 | 232 | 1.51E−03 |
| RS1459914 | 1.33 | 3/4 | 43 | 1.31 | 4/4 | 1 | 2.21 | 6.66 | 2 | 236 | 1.54E−03 |
| RS10501811 | 1.58 | 1/2 | 74 | 1.4 | 2/2 | 158 | 1.29 | 6.66 | 2 | 231 | 1.54E−03 |
| RS890783 | 1.33 | 1/3 | 27 | 1.49 | 3/3 | 6 | 1.17 | 6.65 | 2 | 227 | 1.56E−03 |
| RS10497472 | 1.47 | 4/4 | 210 | 1.31 | 0/0 | 0 | 0 | 10.22 | 1 | 238 | 1.58E−03 |
| RS709087 | 1.37 | 2/4 | 74 | 1.28 | 4/4 | 5 | 1.64 | 6.66 | 2 | 199 | 1.59E−03 |
| RS3104997 | 1.18 | 2/3 | 89 | 1.29 | 3/3 | 126 | 1.38 | 6.63 | 2 | 229 | 1.59E−03 |
| RS1235012 | 1.34 | 2/4 | 34 | 1.31 | 4/4 | 1 | 2.21 | 6.62 | 2 | 233 | 1.60E−03 |
| RS1589629 | 1.22 | 1/3 | 88 | 1.41 | 3/3 | 107 | 1.3 | 6.63 | 2 | 209 | 1.62E−03 |
| RS10483456 | 1.32 | 2/4 | 22 | 1.34 | 4/4 | 1 | 2.21 | 6.64 | 2 | 199 | 1.62E−03 |
| RS10521240 | 1.56 | 1/2 | 63 | 1.25 | 2/2 | 163 | 1.36 | 6.61 | 2 | 229 | 1.62−03 |
| RS4739647 | 1.13 | 1/3 | 51 | 1.43 | 3/3 | 174 | 1.31 | 6.61 | 2 | 228 | 1.62E−03 |
| RS1121640 | 1.32 | 2/4 | 27 | 1.39 | 4/4 | 2 | 1.92 | 6.6 | 2 | 236 | 1.63E−03 |
| RS10512000 | 1.22 | 4/4 | 204 | 1.35 | 0/0 | 0 | 0 | 10.15 | 1 | 239 | 1.64E−03 |
| RS10486470 | 1.59 | 1/3 | 68 | 1.31 | 3/3 | 159 | 1.32 | 6.58 | 2 | 235 | 1.66E−03 |
| RS1362406 | 1.33 | 3/4 | 22 | 1.33 | 4/4 | 1 | 2.21 | 6.58 | 2 | 234 | 1.66E−03 |
| RS8054578 | 1.81 | 1/3 | 62 | 1.36 | 3/3 | 170 | 1.31 | 6.58 | 2 | 232 | 1.66E−03 |
| RS1228685 | 1.35 | 3/4 | 37 | 1.22 | 4/4 | 4 | 1.59 | 6.59 | 2 | 219 | 1.66E−03 |
| RS10508903 | 1.45 | 1/2 | 118 | 1.33 | 2/2 | 47 | 1.27 | 6.6 | 2 | 207 | 1.66E−03 |
| RS6068024 | 1.31 | 2/4 | 104 | 1.39 | 4/4 | 65 | 1.25 | 6.58 | 2 | 223 | 1.67E−03 |
| RS4945630 | 1.4 | 1/3 | 114 | 1.31 | 3/3 | 36 | 1.24 | 6.56 | 2 | 233 | 1.69E−03 |
| RS2425570 | 1.3 | 2/4 | 31 | 1.36 | 4/4 | 10 | 1.58 | 6.59 | 2 | 196 | 1.70E−03 |
| RS758780 | 1.27 | 2/4 | 114 | 1.35 | 4/4 | 33 | 1.44 | 6.55 | 2 | 238 | 1.70E−03 |
| RS758779 | 1.27 | 1/4 | 114 | 1.35 | 4/4 | 33 | 1.44 | 6.55 | 2 | 238 | 1.70E−03 |
| RS798101 | 1.32 | 2/4 | 121 | 1.29 | 4/4 | 46 | 1.45 | 6.55 | 2 | 231 | 1.71E−03 |
| RS6895637 | 1.39 | 3/4 | 94 | 1.27 | 4/4 | 23 | 1.3 | 6.55 | 2 | 226 | 1.72E−03 |
| RS6777583 | 1.34 | 2/4 | 114 | 1.37 | 4/4 | 47 | 1.22 | 6.54 | 2 | 233 | 1.72E−03 |
| RS10518896 | 1.54 | 4/4 | 227 | 1.32 | 0/0 | 0 | 0 | 10.04 | 1 | 238 | 1.73E−03 |
| RS10498944 | 1.83 | 1/4 | 38 | 1.41 | 4/4 | 200 | 1.31 | 6.53 | 2 | 237 | 1.74E−03 |
| RS4631686 | 1.61 | 3/3 | 228 | 1.33 | 0/0 | 0 | 0 | 10.04 | 1 | 234 | 1.74E−03 |
| RS10503057 | 1.37 | 1/4 | 77 | 1.25 | 4/4 | 9 | 1.45 | 6.53 | 2 | 235 | 1.74E−03 |
| RS246580 | 1.32 | 2/4 | 58 | 1.35 | 4/4 | 6 | 1.68 | 6.53 | 2 | 234 | 1.74E−03 |
| RS719530 | 1.26 | 2/4 | 93 | 1.4 | 4/4 | 65 | 1.31 | 6.55 | 2 | 209 | 1.74E−03 |
| RS10483942 | 1.21 | 2/4 | 35 | 1.46 | 4/4 | 198 | 1.3 | 6.53 | 2 | 232 | 1.74E−03 |
| RS1499976 | 1.29 | 2/4 | 73 | 1.36 | 4/4 | 14 | 1.51 | 6.52 | 2 | 232 | 1.76E−03 |
| RS2769261 | 1.37 | 1/2 | 60 | 1.44 | 2/2 | 140 | 1.3 | 6.54 | 2 | 207 | 1.76E−03 |
| RS752355 | 1.56 | 1/2 | 101 | 1.32 | 2/2 | 110 | 1.33 | 6.52 | 2 | 223 | 1.77E−03 |
| RS10485492 | 2.21 | 2/4 | 16 | 1.32 | 4/4 | 221 | 1.33 | 6.51 | 2 | 235 | 1.77E−03 |
| RS2296697 | 1.3 | 2/4 | 55 | 1.4 | 4/4 | 10 | 1.52 | 6.51 | 2 | 231 | 1.78E−03 |
| RS717806 | 1.52 | 1/4 | 95 | 1.36 | 4/4 | 125 | 1.28 | 6.5 | 2 | 228 | 1.80E−03 |
| RS1887545 | 0.96 | 1/3 | 37 | 1.42 | 3/3 | 178 | 1.32 | 6.5 | 2 | 215 | 1.82E−03 |
| RS1506672 | 1.43 | 2/4 | 95 | 1.27 | 4/4 | 78 | 1.35 | 6.5 | 2 | 212 | 1.82E−03 |
| RS10494584 | 1.31 | 2/4 | 78 | 1.36 | 4/4 | 7 | 1.63 | 6.48 | 2 | 235 | 1.82E−03 |
| RS1480145 | 1.32 | 2/3 | 12 | 1.55 | 0/0 | 0 | 0 | 9.94 | 1 | 239 | 1.82E−03 |
| RS3218491 | 1.64 | 4/4 | 230 | 1.32 | 0/0 | 0 | 0 | 9.94 | 1 | 234 | 1.83E−03 |
| RS10510104 | 1.65 | 2/4 | 78 | 1.37 | 4/4 | 158 | 1.3 | 6.47 | 2 | 238 | 1.84E−03 |
| RS1465135 | 1.27 | 1/3 | 74 | 1.4 | 3/3 | 20 | 1.35 | 6.49 | 2 | 211 | 1.84E−03 |
| RS1010504 | 2.21 | 1/3 | 27 | 1.34 | 3/3 | 210 | 1.33 | 6.47 | 2 | 235 | 1.84E−03 |
| RS956408 | 1.31 | 2/4 | 92 | 1.3 | 4/4 | 33 | 1.47 | 6.47 | 2 | 234 | 1.84E−03 |
| RS10497568 | 1.23 | 2/3 | 112 | 1.39 | 3/3 | 73 | 1.32 | 6.47 | 2 | 226 | 1.85E−03 |
| RS10510986 | 1.31 | 1/3 | 42 | 1.46 | 3/3 | 3 | 1.31 | 6.46 | 2 | 236 | 1.86E−03 |
| RS929332 | 1.28 | 2/4 | 93 | 1.4 | 4/4 | 17 | 1.34 | 6.46 | 2 | 236 | 1.86E−03 |
| RS6772743 | 1.61 | 2/3 | 60 | 1.34 | 3/3 | 166 | 1.31 | 6.46 | 2 | 232 | 1.86E−03 |
| RS10521297 | 1.33 | 1/3 | 43 | 1.34 | 3/3 | 1 | 2.21 | 6.46 | 2 | 232 | 1.86E−03 |
| RS7775656 | 1.37 | 1/3 | 60 | 1.24 | 3/3 | 8 | 1.3 | 6.46 | 2 | 229 | 1.87E−03 |
| RS2291385 | 1.48 | 3/3 | 215 | 1.31 | 0/0 | 0 | 0 | 9.88 | 1 | 238 | 1.88E−03 |
| RS10490656 | 1.37 | 1/3 | 84 | 1.26 | 3/3 | 17 | 1.41 | 6.44 | 2 | 238 | 1.89E−03 |
| RS3820182 | 1.63 | 1/3 | 79 | 1.35 | 3/3 | 153 | 1.31 | 6.44 | 2 | 236 | 1.89E−03 |
| RS6990997 | 1.4 | 2/4 | 38 | 1.46 | 4/4 | 194 | 1.31 | 6.44 | 2 | 235 | 1.89E−03 |
| RS1883736 | 1.53 | 3/3 | 226 | 1.32 | 0/0 | 0 | 0 | 9.86 | 1 | 238 | 1.90E−03 |
| RS228563 | 1.22 | 1/2 | 90 | 1.38 | 2/2 | 83 | 1.35 | 6.45 | 2 | 215 | 1.90E−03 |
| RS2353193 | 1.29 | 2/3 | 79 | 1.41 | 3/3 | 4 | 1.36 | 6.43 | 2 | 237 | 1.91E−03 |
| RS10483887 | 2.21 | 2/4 | 19 | 1.33 | 4/4 | 215 | 1.33 | 6.43 | 2 | 232 | 1.91E−03 |
| RS10492047 | 1.46 | 3/4 | 21 | 1.51 | 4/4 | 218 | 1.31 | 6.42 | 2 | 238 | 1.93E−03 |
| RS6955049 | 2.21 | 1/3 | 48 | 1.33 | 3/3 | 177 | 1.33 | 6.42 | 2 | 223 | 1.95E−03 |
| RS7181421 | 1.29 | 2/4 | 116 | 1.39 | 4/4 | 30 | 1.24 | 6.41 | 2 | 234 | 1.95E−03 |
| RS246575 | 1.31 | 1/2 | 60 | 1.36 | 2/2 | 5 | 1.69 | 6.4 | 2 | 234 | 1.97E−03 |
| RS10510809 | 1.3 | 2/4 | 58 | 1.43 | 4/4 | 10 | 1.38 | 6.4 | 2 | 229 | 1.97E−03 |
| RS10517211 | 1.31 | 2/4 | 53 | 1.4 | 4/4 | 4 | 1.65 | 6.39 | 2 | 238 | 1.98E−03 |
| RS10517954 | 1.1 | 1/3 | 44 | 1.43 | 3/3 | 177 | 1.32 | 6.4 | 2 | 224 | 1.98E−03 |
| RS7529360 | 1.31 | 2/4 | 107 | 1.31 | 4/4 | 35 | 1.47 | 6.39 | 2 | 233 | 1.99E−03 |
| RS1046852 | 1.46 | 1/3 | 111 | 1.32 | 3/3 | 88 | 1.29 | 6.38 | 2 | 233 | 2.01E−03 |
| RS10509702 | 1.32 | 1/3 | 10 | 1.52 | 3/3 | 1 | 1.96 | 6.37 | 2 | 236 | 2.02E−03 |
| RS958425 | 1.31 | 1/2 | 58 | 1.4 | 2/2 | 2 | 1.75 | 6.36 | 2 | 237 | 2.04E−03 |
| RS4673999 | 1.42 | 1/4 | 124 | 1.3 | 4/4 | 49 | 1.28 | 6.36 | 2 | 234 | 2.04E−03 |
| RS4888946 | 1.31 | 1/4 | 59 | 1.35 | 4/4 | 3 | 1.81 | 6.36 | 2 | 230 | 2.05E−03 |
| RS2163721 | 1.34 | 2/4 | 9 | 1.09 | 0/0 | 0 | 0 | 9.71 | 1 | 234 | 2.06E−03 |
| RS7782588 | 1.32 | 1/3 | 46 | 1.28 | 3/3 | 13 | 1.55 | 6.36 | 2 | 213 | 2.08E−03 |
| RS10489688 | 1.29 | 1/3 | 99 | 1.35 | 3/3 | 32 | 1.46 | 6.34 | 2 | 236 | 2.08E−03 |
| RS10514844 | 1.62 | 3/3 | 232 | 1.33 | 0/0 | 0 | 0 | 9.69 | 1 | 237 | 2.08E−03 |
| RS779320 | 1.39 | 2/4 | 92 | 1.27 | 4/4 | 24 | 1.3 | 6.33 | 2 | 233 | 2.10E−03 |
| RS3749216 | 1.33 | 1/3 | 4 | 1.71 | 0/0 | 0 | 0 | 9.65 | 1 | 239 | 2.12E−03 |
| RS10496466 | 1.38 | 2/4 | 73 | 1.27 | 4/4 | 8 | 1.5 | 6.34 | 2 | 205 | 2.13E−03 |
| RS650298 | 1.4 | 2/4 | 110 | 1.28 | 4/4 | 53 | 1.36 | 6.31 | 2 | 235 | 2.14E−03 |
| RS2671762 | 1.3 | 2/4 | 43 | 1.44 | 4/4 | 3 | 1.53 | 6.29 | 2 | 237 | 2.18E−03 |
| RS10517293 | 1.46 | 3/3 | 198 | 1.31 | 0/0 | 0 | 0 | 9.61 | 1 | 226 | 2.18E−03 |
| RS1851006 | 1.28 | 2/4 | 63 | 1.26 | 4/4 | 70 | 1.4 | 6.34 | 2 | 175 | 2.20E−03 |
| RS2761089 | 1.3 | 2/4 | 105 | 1.38 | 4/4 | 31 | 1.22 | 6.3 | 2 | 213 | 2.20E−03 |
| RS10510987 | 1.31 | 2/4 | 36 | 1.46 | 4/4 | 197 | 1.31 | 6.28 | 2 | 233 | 2.21E−03 |
| RS362865 | 1.36 | 2/3 | 54 | 1.26 | 3/3 | 5 | 1.06 | 6.27 | 2 | 236 | 2.22E−03 |
| RS8089476 | 1.28 | 2/4 | 109 | 1.29 | 4/4 | 94 | 1.4 | 6.27 | 2 | 233 | 2.23E−03 |
| RS1805781 | 1.64 | 3/3 | 231 | 1.33 | 0/0 | 0 | 0 | 9.55 | 1 | 235 | 2.24E−03 |
| RS6837953 | 1.93 | 1/3 | 33 | 1.42 | 3/3 | 191 | 1.31 | 6.27 | 2 | 222 | 2.24E−03 |
| RS4504494 | 1.54 | 3/3 | 228 | 1.32 | 0/0 | 0 | 0 | 9.54 | 1 | 239 | 2.25E−03 |
| RS7556543 | 1.63 | 1/3 | 67 | 1.36 | 3/3 | 154 | 1.31 | 6.26 | 2 | 225 | 2.26E−03 |
| RS2001097 | 1.66 | 1/2 | 58 | 1.39 | 2/2 | 165 | 1.31 | 6.26 | 2 | 225 | 2.26E−03 |
| RS286300 | 1.31 | 2/4 | 26 | 1.48 | 4/4 | 1 | 1.04 | 6.25 | 2 | 237 | 2.26E−03 |
| RS10484926 | 1.33 | 2/4 | 4 | 1.71 | 0/0 | 0 | 0 | 9.53 | 1 | 235 | 2.26E−03 |
| RS2290547 | 1.27 | 1/3 | 87 | 1.4 | 3/3 | 138 | 1.29 | 6.25 | 2 | 235 | 2.27E−03 |
| RS543465 | 1.31 | 2/4 | 32 | 1.48 | 4/4 | 3 | 1.35 | 6.25 | 2 | 235 | 2.27E−03 |
| RS320694 | 1.28 | 2/3 | 101 | 1.4 | 3/3 | 78 | 1.28 | 6.25 | 2 | 225 | 2.28E−03 |
| RS9329911 | 1.35 | 1/3 | 107 | 1.34 | 3/3 | 12 | 1.09 | 6.24 | 2 | 237 | 2.29E−03 |
| RS10486471 | 1.59 | 2/3 | 72 | 1.32 | 3/3 | 155 | 1.32 | 6.24 | 2 | 235 | 2.29E−03 |
| RS6938470 | 1.76 | 1/3 | 52 | 1.37 | 3/3 | 173 | 1.31 | 6.24 | 2 | 225 | 2.30E−03 |
| RS1501622 | 1.28 | 2/4 | 97 | 1.29 | 4/4 | 94 | 1.4 | 6.23 | 2 | 233 | 2.31E−03 |
| RS4611835 | 1.88 | 1/2 | 18 | 1.42 | 2/2 | 213 | 1.32 | 6.22 | 2 | 230 | 2.34E−03 |
| RS10483426 | 1.37 | 2/4 | 122 | 1.28 | 4/4 | 55 | 1.41 | 6.21 | 2 | 237 | 2.35E−03 |
| RS2292250 | 1.33 | 1/3 | 19 | 1.5 | 0/0 | 0 | 0 | 9.46 | 1 | 230 | 2.35E−03 |
| RS4952605 | 1.18 | 1/4 | 101 | 1.38 | 4/4 | 92 | 1.3 | 6.22 | 2 | 211 | 2.37E−03 |
| RS1957425 | 1.36 | 1/3 | 108 | 1.28 | 3/3 | 30 | 1.45 | 6.2 | 2 | 237 | 2.37E−03 |
| RS3773636 | 1.52 | 1/3 | 72 | 1.27 | 3/3 | 139 | 1.35 | 6.21 | 2 | 221 | 2.38E−03 |
| RS4405428 | 1.33 | 2/4 | 52 | 1.32 | 4/4 | 2 | 1.93 | 6.2 | 2 | 234 | 2.38E−03 |
| RS10498096 | 1.07 | 2/4 | 25 | 1.49 | 4/4 | 210 | 1.32 | 6.2 | 2 | 233 | 2.38E−03 |
| RS2316853 | 1.47 | 3/3 | 102 | 1.29 | 0/0 | 0 | 0 | 9.61 | 1 | 127 | 2.38E−03 |
| RS723043 | 1.26 | 3/4 | 113 | 1.34 | 4/4 | 32 | 1.45 | 6.21 | 2 | 210 | 2.40E−03 |
| RS2217610 | 1.29 | 1/3 | 74 | 1.38 | 3/3 | 11 | 1.49 | 6.2 | 2 | 219 | 2.40E−03 |
| RS1878144 | 1.33 | 3/4 | 47 | 1.31 | 4/4 | 5 | 1.71 | 6.19 | 2 | 230 | 2.41E−03 |
| RS10496527 | 1.29 | 2/4 | 94 | 1.26 | 4/4 | 57 | 1.41 | 6.22 | 2 | 190 | 2.42E−03 |
| RS2971828 | 1.31 | 1/3 | 74 | 1.35 | 3/3 | 10 | 1.58 | 6.18 | 2 | 237 | 2.42E−03 |
| RS2669892 | 1.29 | 1/3 | 70 | 1.42 | 3/3 | 9 | 1.33 | 6.18 | 2 | 235 | 2.24E−03 |
| RS1915546 | 1.26 | 2/4 | 117 | 1.39 | 4/4 | 35 | 1.3 | 6.18 | 2 | 226 | 2.44E−03 |
| RS823692 | 1.78 | 1/2 | 31 | 1.21 | 2/2 | 209 | 1.35 | 6.17 | 2 | 238 | 2.44E−03 |
| RS1334722 | 1.3 | 1/3 | 110 | 1.39 | 3/3 | 24 | 1.22 | 6.17 | 2 | 238 | 2.44E−03 |
| RS580758 | 1.68 | 1/2 | 39 | 1.4 | 2/2 | 197 | 1.31 | 6.17 | 2 | 237 | 2.44E−03 |
| RS285406 | 1.32 | 2/4 | 22 | 1.49 | 0/0 | 0 | 0 | 9.38 | 1 | 239 | 2.44E−03 |
| RS10500683 | 1.32 | 2/4 | 110 | 1.3 | 4/4 | 33 | 1.47 | 6.17 | 2 | 233 | 2.45E−03 |
| RS1413191 | 1.7 | 1/3 | 64 | 1.35 | 3/3 | 160 | 1.32 | 6.17 | 2 | 226 | 2.46E−03 |
| RS600524 | 1.33 | 2/4 | 94 | 1.3 | 4/4 | 32 | 1.47 | 6.17 | 2 | 223 | 2.47E−03 |
| RS1506326 | 1.39 | 3/4 | 63 | 1.24 | 4/4 | 152 | 1.37 | 6.17 | 2 | 223 | 2.47E−03 |
| RS10495774 | 1.6 | 2/4 | 75 | 1.32 | 4/4 | 154 | 1.32 | 6.16 | 2 | 236 | 2.47E−03 |
| RS10497783 | 1.94 | 1/4 | 33 | 1.31 | 4/4 | 202 | 1.33 | 6.16 | 2 | 234 | 2.47E−03 |
| RS1579274 | 1.51 | 1/2 | 91 | 1.33 | 2/2 | 129 | 1.3 | 6.14 | 2 | 236 | 2.51E−03 |
| RS10503572 | 1.67 | 3/3 | 234 | 1.33 | 0/0 | 0 | 0 | 9.32 | 1 | 237 | 2.53E−03 |
| RS2195989 | 1.58 | 2/4 | 51 | 1.38 | 4/4 | 171 | 1.31 | 6.14 | 2 | 228 | 2.53E−03 |
| RS2223753 | 1.32 | 1/4 | 121 | 1.3 | 4/4 | 44 | 1.45 | 6.13 | 2 | 238 | 2.54E−03 |
| RS737769 | 1.45 | 4/4 | 204 | 1.31 | 0/0 | 0 | 0 | 9.3 | 1 | 239 | 2.55E−03 |
| RS39626 | 1.38 | 2/4 | 95 | 1.27 | 4/4 | 15 | 1.31 | 6.12 | 2 | 237 | 2.56E−03 |
| RS7828096 | 1.79 | 1/3 | 29 | 1.45 | 3/3 | 210 | 1.31 | 6.11 | 2 | 237 | 2.59E−03 |
| RS10518660 | 1.31 | 1/3 | 29 | 1.46 | 0/0 | 0 | 0 | 9.27 | 1 | 237 | 2.59E−03 |
| RS958978 | 1.31 | 1/3 | 81 | 1.34 | 3/3 | 9 | 1.6 | 6.11 | 2 | 232 | 2.59E−03 |
| RS717897 | 1.26 | 1/3 | 87 | 1.4 | 3/3 | 132 | 1.29 | 6.11 | 2 | 227 | 2.60E−03 |
| RS10517210 | 1.78 | 2/3 | 55 | 1.42 | 3/3 | 184 | 1.31 | 6.1 | 2 | 237 | 2.61E−03 |
| RS720614 | 1.6 | 2/4 | 70 | 1.34 | 4/4 | 160 | 1.31 | 6.1 | 2 | 236 | 2.61E−03 |
| RS6949530 | 1.31 | 1/4 | 63 | 1.38 | 4/4 | 4 | 1.67 | 6.09 | 2 | 238 | 2.63E−03 |
| RS989177 | 1.56 | 2/4 | 40 | 1.33 | 4/4 | 155 | 1.31 | 6.11 | 2 | 205 | 2.65E−03 |
| RS2591651 | 1.66 | 3/3 | 236 | 1.33 | 0/0 | 0 | 0 | 9.21 | 1 | 239 | 2.67E−03 |
| RS962354 | 1.32 | 1/4 | 49 | 1.3 | 4/4 | 8 | 1.61 | 6.08 | 2 | 226 | 2.68E−03 |
| RS590599 | 1.33 | 2/3 | 53 | 1.44 | 3/3 | 169 | 1.3 | 6.08 | 2 | 226 | 2.68E−03 |
| RS198278 | 1.24 | 1/3 | 118 | 1.34 | 3/3 | 59 | 1.39 | 6.07 | 2 | 227 | 2.70E−03 |
| RS870241 | 1.29 | 2/4 | 78 | 1.37 | 4/4 | 24 | 1.46 | 6.07 | 2 | 222 | 2.71E−03 |
| RS727505 | 1.31 | 2/4 | 71 | 1.34 | 4/4 | 9 | 1.6 | 6.06 | 2 | 234 | 2.72E−03 |
| RS10503068 | 1.42 | 2/4 | 75 | 1.26 | 4/4 | 137 | 1.37 | 6.07 | 2 | 219 | 2.72E−03 |
| RS1356216 | 1.33 | 3/4 | 47 | 1.31 | 4/4 | 5 | 1.71 | 6.05 | 2 | 236 | 2.74E−03 |
| RS10483988 | 1.34 | 2/4 | 62 | 1.3 | 4/4 | 4 | 1.73 | 6.05 | 2 | 236 | 2.74E−03 |
| RS2040868 | 1.28 | 2/4 | 81 | 1.4 | 4/4 | 18 | 1.34 | 6.05 | 2 | 224 | 2.76E−03 |
| RS694795 | 1.36 | 1/4 | 115 | 1.29 | 4/4 | 58 | 1.42 | 6.05 | 2 | 223 | 2.76E−03 |
| RS4073474 | 1.35 | 1/3 | 107 | 1.28 | 3/3 | 33 | 1.45 | 6.04 | 2 | 237 | 2.76E−03 |
| RS10513166 | 1.91 | 2/3 | 43 | 1.29 | 3/3 | 195 | 1.34 | 6.04 | 2 | 237 | 2.76E−03 |
| RS9306468 | 1.37 | 1/3 | 81 | 1.29 | 3/3 | 11 | 1.15 | 6.04 | 2 | 235 | 2.77E−03 |
| RS2825652 | 1.32 | 2/3 | 10 | 1.56 | 0/0 | 0 | 0 | 9.14 | 1 | 238 | 2.77E−03 |
| RS9325559 | 1.67 | 1/3 | 67 | 1.31 | 3/3 | 119 | 1.32 | 6.07 | 2 | 189 | 2.79E−03 |
| RS1519684 | 1.42 | 2/4 | 118 | 1.36 | 4/4 | 89 | 1.26 | 6.03 | 2 | 232 | 2.80E−03 |
| RS4533975 | 1.33 | 2/4 | 60 | 1.28 | 4/4 | 16 | 1.52 | 6.03 | 2 | 229 | 2.80E−03 |
| RS2973234 | 1.33 | 2/4 | 78 | 1.3 | 4/4 | 22 | 1.51 | 6.04 | 2 | 212 | 2.81E−03 |
| RS10513319 | 1.32 | 1/3 | 16 | 1.51 | 0/0 | 0 | 0 | 9.11 | 1 | 238 | 2.82E−03 |
| RS847852 | 1.26 | 1/3 | 110 | 1.39 | 3/3 | 89 | 1.29 | 6.01 | 2 | 235 | 2.85E−03 |
| RS9319997 | 1.37 | 2/4 | 76 | 1.26 | 4/4 | 7 | 1.46 | 6.01 | 2 | 231 | 2.85E−03 |
| RS953177 | 1.32 | 2/4 | 26 | 1.47 | 0/0 | 0 | 0 | 9.08 | 1 | 237 | 2.86E−03 |
| RS10489474 | 1.33 | 2/4 | 72 | 1.29 | 4/4 | 10 | 1.58 | 6 | 2 | 238 | 2.87E−03 |
| RS10490347 | 1.36 | 2/4 | 46 | 1.22 | 4/4 | 194 | 1.36 | 6 | 2 | 238 | 2.87E−03 |
| RS947271 | 1.43 | 1/3 | 106 | 1.31 | 3/3 | 76 | 1.3 | 6 | 2 | 235 | 2.87E−03 |
| RS1608272 | 1.3 | 1/4 | 93 | 1.4 | 4/4 | 18 | 1.24 | 5.99 | 2 | 237 | 2.90E−03 |
| RS9320780 | 1.17 | 1/3 | 74 | 1.4 | 3/3 | 132 | 1.32 | 6 | 2 | 216 | 2.91E−03 |
| RS10516971 | 1.38 | 1/3 | 86 | 1.28 | 3/3 | 13 | 1.23 | 5.98 | 2 | 235 | 2.93E−03 |
| RS4597125 | 1.63 | 1/3 | 65 | 1.36 | 3/3 | 149 | 1.3 | 5.99 | 2 | 217 | 2.94E−03 |
| RS10493351 | 1.32 | 2/4 | 10 | 1.56 | 0/0 | 0 | 0 | 9.03 | 1 | 239 | 2.94E−03 |
| RS756458 | 1.28 | 2/3 | 79 | 1.41 | 3/3 | 144 | 1.3 | 5.97 | 2 | 238 | 2.95E−03 |
| RS333856 | 1.61 | 2/2 | 234 | 1.32 | 0/0 | 0 | 0 | 9.02 | 1 | 239 | 2.95E−03 |
| RS6844368 | 1.31 | 3/4 | 120 | 1.29 | 4/4 | 81 | 1.41 | 5.97 | 2 | 236 | 2.96E−03 |
| RS4146127 | 1.31 | 1/3 | 70 | 1.39 | 3/3 | 4 | 1.66 | 5.97 | 2 | 232 | 2.96E−03 |
| RS1254275 | 1.66 | 3/4 | 58 | 1.3 | 4/4 | 169 | 1.33 | 5.97 | 2 | 230 | 2.97E−03 |
| RS2804861 | 1.32 | 1/3 | 55 | 1.42 | 3/3 | 8 | 1.16 | 5.97 | 2 | 229 | 2.97E−03 |
| RS1268444 | 1.26 | 2/4 | 103 | 1.38 | 4/4 | 27 | 1.39 | 5.98 | 2 | 214 | 2.97E−03 |
| RS176157 | 1.89 | 1/3 | 34 | 1.38 | 3/3 | 205 | 1.32 | 5.96 | 2 | 238 | 2.98E−03 |
| RS10506681 | 1.27 | 2/4 | 110 | 1.36 | 4/4 | 31 | 1.43 | 5.96 | 2 | 237 | 2.98E−03 |
| RS1581412 | 1.24 | 2/4 | 98 | 1.39 | 4/4 | 109 | 1.3 | 5.96 | 2 | 236 | 2.98E−03 |
| RS2111826 | 1.22 | 3/3 | 201 | 1.35 | 0/0 | 0 | 0 | 9 | 1 | 236 | 2.99E−03 |
| RS2018842 | 1.39 | 1/3 | 119 | 1.33 | 3/3 | 37 | 1.22 | 5.96 | 2 | 233 | 2.99E−03 |
| RS1298362 | 1.23 | 1/3 | 112 | 1.34 | 3/3 | 65 | 1.38 | 5.96 | 2 | 226 | 3.00E−03 |
| RS4492337 | 1.28 | 1/3 | 95 | 1.38 | 3/3 | 24 | 1.44 | 5.96 | 2 | 225 | 3.00E−03 |
| RS2246219 | 1.14 | 1/3 | 95 | 1.35 | 3/3 | 127 | 1.34 | 5.95 | 2 | 236 | 3.01E−03 |
| RS9285977 | 1.3 | 2/4 | 110 | 1.39 | 4/4 | 55 | 1.26 | 5.95 | 2 | 230 | 3.02E−03 |
| RS9322914 | 1.33 | 2/4 | 48 | 1.31 | 4/4 | 5 | 1.7 | 5.95 | 2 | 228 | 3.03E−03 |
| RS4721923 | 1.28 | 3/4 | 89 | 1.41 | 4/4 | 129 | 1.3 | 5.94 | 2 | 236 | 3.04E−03 |
| RS4140855 | 1.5 | 1/3 | 36 | 1.23 | 3/3 | 155 | 1.36 | 5.97 | 2 | 196 | 3.04E−03 |
| RS10518014 | 1.29 | 1/3 | 104 | 1.28 | 3/3 | 110 | 1.39 | 5.93 | 2 | 231 | 3.08E−03 |
| RS1979739 | 1.25 | 1/3 | 60 | 1.42 | 3/3 | 100 | 1.31 | 5.96 | 2 | 191 | 3.08E−03 |
| RS10515526 | 1.61 | 3/3 | 234 | 1.32 | 0/0 | 0 | 0 | 8.93 | 1 | 239 | 3.10E−03 |
| RS2887919 | 1.42 | 1/4 | 97 | 1.27 | 4/4 | 120 | 1.36 | 5.92 | 2 | 235 | 3.10E−03 |
| RS6954168 | 1.32 | 2/4 | 7 | 1.6 | 0/0 | 0 | 0 | 8.91 | 1 | 238 | 3.13E−03 |
| RS2825673 | 1.48 | 2/4 | 43 | 1.44 | 4/4 | 186 | 1.31 | 5.91 | 2 | 232 | 3.14E−03 |
| RS4608876 | 1.29 | 1/2 | 105 | 1.39 | 2/2 | 32 | 1.27 | 5.9 | 2 | 238 | 3.16E−03 |
| RS7241109 | 1.27 | 1/3 | 100 | 1.39 | 3/3 | 23 | 1.35 | 5.9 | 2 | 232 | 3.17E−03 |
| RS2042651 | 1.27 | 1/3 | 104 | 1.4 | 3/3 | 98 | 1.29 | 5.91 | 2 | 217 | 3.17E−03 |
| RS4661451 | 1.28 | 1/3 | 127 | 1.39 | 3/3 | 59 | 1.28 | 5.89 | 2 | 236 | 3.19E−03 |
| RS6708913 | 1.79 | 1/3 | 38 | 1.29 | 3/3 | 180 | 1.33 | 5.9 | 2 | 218 | 3.20E−03 |
| RS211587 | 1.89 | 2/4 | 52 | 1.29 | 4/4 | 186 | 1.34 | 5.88 | 2 | 237 | 3.22E−03 |
| RS2409113 | 1.29 | 2/4 | 75 | 1.41 | 4/4 | 11 | 1.34 | 5.88 | 2 | 235 | 3.22E−03 |
| RS7926211 | 1.24 | 1/3 | 82 | 1.41 | 3/3 | 138 | 1.3 | 5.87 | 2 | 237 | 3.25E−03 |
| RS11232919 | 1.92 | 2/4 | 61 | 1.32 | 4/4 | 177 | 1.33 | 5.87 | 2 | 237 | 3.25E−03 |
| RS720613 | 1.31 | 2/4 | 71 | 1.34 | 4/4 | 10 | 1.59 | 5.88 | 2 | 220 | 3.25E−03 |
| RS10498518 | 1.45 | 1/3 | 106 | 1.28 | 3/3 | 102 | 1.36 | 5.87 | 2 | 235 | 3.25E−03 |
| RS2670607 | 1.82 | 1/4 | 44 | 1.33 | 4/4 | 190 | 1.33 | 5.87 | 2 | 234 | 3.26E−03 |
| RS10506700 | 1.36 | 2/4 | 76 | 1.3 | 4/4 | 6 | 1.03 | 5.87 | 2 | 229 | 3.27E−03 |
| RS10496626 | 1.49 | 4/4 | 216 | 1.32 | 0/0 | 0 | 0 | 8.83 | 1 | 233 | 3.27E−03 |
| RS10514450 | 1.81 | 2/4 | 53 | 1.34 | 4/4 | 168 | 1.32 | 5.87 | 2 | 221 | 3.28E−03 |
| RS2288272 | 1.33 | 2/4 | 83 | 1.28 | 4/4 | 34 | 1.45 | 5.86 | 2 | 227 | 3.30E−03 |
| RS1938327 | 1.32 | 1/3 | 18 | 1.5 | 0/0 | 0 | 0 | 8.81 | 1 | 238 | 3.30E−03 |
| RS1296210 | 1.43 | 2/3 | 112 | 1.29 | 3/3 | 71 | 1.32 | 5.85 | 2 | 237 | 3.31E−03 |
| RS10495058 | 1.61 | 3/3 | 227 | 1.32 | 0/0 | 0 | 0 | 8.79 | 1 | 232 | 3.34E−03 |
| RS10507605 | 1.32 | 1/4 | 25 | 1.39 | 4/4 | 2 | 1.88 | 5.84 | 2 | 235 | 3.35E−03 |
| RS1944989 | 1.47 | 1/3 | 96 | 1.27 | 3/3 | 126 | 1.36 | 5.84 | 2 | 233 | 3.35E−03 |
| RS10490838 | 1.32 | 1/3 | 15 | 1.51 | 0/0 | 0 | 0 | 8.78 | 1 | 239 | 3.35E−03 |
| RS2257086 | 1.3 | 2/4 | 78 | 1.42 | 4/4 | 15 | 1.35 | 5.84 | 2 | 224 | 3.37E−03 |
| RS6601146 | 1.29 | 3/4 | 81 | 1.27 | 4/4 | 132 | 1.38 | 5.83 | 2 | 233 | 3.38E−03 |
| RS25931 | 1.44 | 3/3 | 203 | 1.31 | 0/0 | 0 | 0 | 8.76 | 1 | 239 | 3.39E−03 |
| RS10516613 | 1.29 | 2/3 | 89 | 1.42 | 3/3 | 43 | 1.3 | 5.86 | 2 | 190 | 3.39E−03 |
| RS1931991 | 1.08 | 3/4 | 34 | 1.42 | 4/4 | 200 | 1.33 | 5.82 | 2 | 238 | 3.41E−03 |
| RS261861 | 1.24 | 1/3 | 107 | 1.31 | 3/3 | 86 | 1.39 | 5.82 | 2 | 228 | 3.43E−03 |
| RS1460176 | 1.28 | 1/2 | 107 | 1.4 | 2/2 | 27 | 1.29 | 5.81 | 2 | 236 | 3.44E−03 |
| RS10504744 | 1.31 | 2/3 | 108 | 1.31 | 3/3 | 32 | 1.47 | 5.81 | 2 | 236 | 3.44E−03 |
| RS10484407 | 1.06 | 1/3 | 11 | 1.55 | 3/3 | 223 | 1.32 | 5.81 | 2 | 233 | 3.45E−03 |
| RS4722207 | 1.47 | 1/2 | 106 | 1.29 | 2/2 | 103 | 1.34 | 5.81 | 2 | 233 | 3.45E−03 |
| RS2009373 | 1.38 | 2/4 | 122 | 1.28 | 4/4 | 71 | 1.39 | 5.81 | 2 | 231 | 3.45E−03 |
| RS10518901 | 1.27 | 1/3 | 96 | 1.34 | 3/3 | 48 | 1.42 | 5.81 | 2 | 221 | 3.47E−03 |
| RS173036 | 1.32 | 2/4 | 10 | 1.56 | 0/0 | 0 | 0 | 8.71 | 1 | 239 | 3.48E−03 |
| RS7718000 | 1.65 | 3/3 | 232 | 1.32 | 0/0 | 0 | 0 | 8.69 | 1 | 235 | 3.52E−03 |
| RS10496647 | 1.96 | 1/3 | 31 | 1.24 | 3/3 | 209 | 1.34 | 5.78 | 2 | 238 | 3.54E−03 |
| RS2374031 | 1.32 | 1/3 | 82 | 1.32 | 3/3 | 16 | 1.53 | 5.78 | 2 | 238 | 3.54E−03 |
| RS10503066 | 1.37 | 1/3 | 76 | 1.26 | 3/3 | 11 | 1.39 | 5.78 | 2 | 237 | 3.54E−03 |
| RS4764277 | 1.26 | 1/3 | 107 | 1.39 | 3/3 | 44 | 1.32 | 5.79 | 2 | 221 | 3.54E−03 |
| RS6977649 | 1.92 | 2/3 | 32 | 1.31 | 3/3 | 202 | 1.33 | 5.78 | 2 | 233 | 3.55E−03 |
| RS1119006 | 1.31 | 3/4 | 23 | 1.46 | 0/0 | 0 | 0 | 8.67 | 1 | 237 | 3.56E−03 |
| RS2827082 | 1.69 | 2/4 | 78 | 1.33 | 4/4 | 149 | 1.31 | 5.78 | 2 | 229 | 3.56E−03 |
| RS185926 | 1.04 | 1/4 | 16 | 1.52 | 4/4 | 213 | 1.32 | 5.78 | 2 | 227 | 3.56E−03 |
| RS1434817 | 1.86 | 1/3 | 4 | 1.01 | 3/3 | 234 | 1.34 | 5.77 | 2 | 236 | 3.58E−03 |
| RS9313999 | 1.42 | 2/4 | 124 | 1.29 | 4/4 | 51 | 1.35 | 5.77 | 2 | 235 | 3.58E−03 |
| RS1011439 | 1 | 1/3 | 13 | 1.54 | 3/3 | 227 | 1.32 | 5.76 | 2 | 238 | 3.61E−03 |
| RS7706518 | 1.31 | 1/3 | 42 | 1.45 | 3/3 | 3 | 1.37 | 5.76 | 2 | 237 | 3.61E−03 |
| RS2157768 | 1.32 | 1/3 | 13 | 1.54 | 3/3 | 1 | 1 | 5.76 | 2 | 237 | 3.61E−03 |
| RS718883 | 1.32 | 1/3 | 80 | 1.32 | 3/3 | 15 | 1.54 | 5.76 | 2 | 232 | 3.62E−03 |
| RS6673693 | 1.64 | 1/2 | 64 | 1.33 | 2/2 | 156 | 1.32 | 5.76 | 2 | 224 | 3.64E−03 |
| RS889053 | 1.12 | 1/3 | 77 | 1.3 | 3/3 | 150 | 1.36 | 5.75 | 2 | 235 | 3.65E−03 |
| RS10498602 | 1.16 | 4/4 | 224 | 1.34 | 0/0 | 0 | 0 | 8.62 | 1 | 238 | 3.65E−03 |
| RS10483512 | 1.26 | 2/4 | 104 | 1.38 | 4/4 | 52 | 1.37 | 5.75 | 2 | 233 | 3.65E−03 |
| RS2362932 | 1.47 | 1/3 | 69 | 1.33 | 3/3 | 97 | 1.3 | 5.77 | 2 | 197 | 3.67E−03 |
| RS1497504 | 1.62 | 1/3 | 66 | 1.35 | 3/3 | 166 | 1.31 | 5.74 | 2 | 236 | 3.68E−03 |
| RS10521241 | 1.58 | 1/3 | 70 | 1.26 | 3/3 | 162 | 1.35 | 5.74 | 2 | 233 | 3.69E−03 |
| RS1025748 | 1.33 | 1/2 | 70 | 1.29 | 2/2 | 15 | 1.53 | 5.74 | 2 | 230 | 3.69E−03 |
| RS10484973 | 1.48 | 2/4 | 70 | 1.39 | 4/4 | 148 | 1.3 | 5.74 | 2 | 229 | 3.70E−03 |
| RS1374028 | 1.35 | 1/3 | 31 | 1.19 | 3/3 | 1 | 1.19 | 5.75 | 2 | 212 | 3.70E−03 |
| RS2842527 | 1.39 | 1/3 | 104 | 1.27 | 3/3 | 39 | 1.37 | 5.74 | 2 | 226 | 3.70E−03 |
| RS5979345 | 1.32 | 3/3 | 13 | 1.53 | 0/0 | 0 | 0 | 8.59 | 1 | 238 | 3.71E−03 |
| RS9312013 | 1.32 | 3/4 | 11 | 1.54 | 0/0 | 0 | 0 | 8.6 | 1 | 223 | 3.71E−03 |
| RS10507607 | 1.32 | 2/3 | 27 | 1.38 | 3/3 | 2 | 1.88 | 5.73 | 2 | 237 | 3.71E−03 |
| RS10494826 | 1.35 | 2/4 | 71 | 1.41 | 4/4 | 156 | 1.29 | 5.73 | 2 | 235 | 3.72E−03 |
| RS634785 | 1.34 | 2/4 | 23 | 1.19 | 0/0 | 0 | 0 | 8.59 | 1 | 229 | 3.72E−03 |
| RS737911 | 1.15 | 1/3 | 74 | 1.29 | 3/3 | 147 | 1.37 | 5.73 | 2 | 229 | 3.73E−03 |
| RS4684321 | 1.32 | 1/3 | 23 | 1.48 | 0/0 | 0 | 0 | 8.55 | 1 | 239 | 3.79E−03 |
| RS2175935 | 1.32 | 3/4 | 54 | 1.42 | 4/4 | 6 | 1.13 | 5.71 | 2 | 232 | 3.80E−03 |
| RS25937 | 1.44 | 3/3 | 203 | 1.31 | 0/0 | 0 | 0 | 8.54 | 1 | 238 | 3.81E−03 |
| RS10507118 | 1.51 | 2/3 | 39 | 1.23 | 3/3 | 136 | 1.37 | 5.72 | 2 | 176 | 3.81E−03 |
| RS2833581 | 1.41 | 2/3 | 99 | 1.36 | 3/3 | 98 | 1.27 | 5.7 | 2 | 235 | 3.83E−03 |
| RS10482871 | 1.65 | 3/3 | 236 | 1.33 | 0/0 | 0 | 0 | 8.53 | 1 | 239 | 3.83E−03 |
| RS4122274 | 1.44 | 1/3 | 96 | 1.36 | 3/3 | 112 | 1.28 | 5.7 | 2 | 233 | 3.83E−03 |
| RS10521316 | 1.25 | 2/3 | 115 | 1.35 | 3/3 | 54 | 1.4 | 5.7 | 2 | 230 | 3.84E−03 |
| RS6673237 | 1.31 | 1/3 | 67 | 1.41 | 3/3 | 6 | 1.14 | 5.69 | 2 | 237 | 3.86E−03 |
| RS2409037 | 1.31 | 3/4 | 42 | 1.45 | 4/4 | 3 | 1.37 | 5.69 | 2 | 236 | 3.86E−03 |
| RS10503069 | 1.37 | 1/3 | 76 | 1.26 | 3/3 | 11 | 1.39 | 5.69 | 2 | 236 | 3.86E−03 |
| RS9784951 | 1.28 | 1/3 | 88 | 1.39 | 3/3 | 18 | 1.34 | 5.69 | 2 | 232 | 3.87E−03 |
| RS10501171 | 1.37 | 2/4 | 124 | 1.28 | 4/4 | 27 | 1.43 | 5.68 | 2 | 236 | 3.90E−03 |
| RS660274 | 1.32 | 1/3 | 49 | 1.42 | 3/3 | 114 | 1.29 | 5.73 | 2 | 170 | 3.91E−03 |
| RS10508378 | 1.96 | 2/4 | 16 | 1.2 | 4/4 | 224 | 1.34 | 5.67 | 2 | 238 | 3.93E−03 |
| RS1386971 | 1.32 | 2/4 | 6 | 1.62 | 0/0 | 0 | 0 | 8.48 | 1 | 238 | 3.93E−03 |
| RS1153606 | 1.33 | 1/3 | 76 | 1.32 | 3/3 | 5 | 1.7 | 5.67 | 2 | 236 | 3.93E−03 |
| RS1905015 | 1.46 | 1/3 | 118 | 1.33 | 3/3 | 90 | 1.29 | 5.67 | 2 | 236 | 3.93E−03 |
| RS10506168 | 1.35 | 1/2 | 72 | 1.33 | 2/2 | 14 | 1.12 | 5.67 | 2 | 236 | 3.93E−03 |
| RS1409993 | 1.28 | 4/4 | 125 | 1.38 | 0/0 | 0 | 0 | 8.48 | 1 | 236 | 3.93E−03 |
| RS2131774 | 1.31 | 1/3 | 56 | 1.25 | 3/3 | 123 | 1.39 | 5.7 | 2 | 182 | 3.97E−03 |
| RS2831853 | 1.34 | 2/3 | 10 | 1.11 | 0/0 | 0 | 0 | 8.46 | 1 | 235 | 3.98E−03 |
| RS10515792 | 1.36 | 2/4 | 79 | 1.31 | 4/4 | 11 | 1.12 | 5.66 | 2 | 232 | 3.98E−03 |
| RS6902590 | 1.28 | 1/4 | 97 | 1.37 | 4/4 | 24 | 1.44 | 5.66 | 2 | 232 | 3.98E−03 |
| RS1904165 | 1.22 | 1/2 | 30 | 1.47 | 2/2 | 185 | 1.32 | 5.67 | 2 | 215 | 3.98E−03 |
| RS10487019 | 1.66 | 2/4 | 27 | 1.45 | 4/4 | 211 | 1.31 | 5.64 | 2 | 237 | 4.05E−03 |
| RS9310715 | 1.33 | 1/3 | 79 | 1.3 | 3/3 | 10 | 1.57 | 5.65 | 2 | 220 | 4.05E−03 |
| RS1410364 | 1.31 | 2/4 | 69 | 1.38 | 4/4 | 12 | 1.53 | 5.65 | 2 | 218 | 4.05E−03 |
| RS1044045 | 1.37 | 1/3 | 66 | 1.25 | 3/3 | 9 | 1.34 | 5.64 | 2 | 230 | 4.06E−03 |
| RS5754499 | 1.19 | 4/4 | 218 | 1.35 | 0/0 | 0 | 0 | 8.41 | 1 | 238 | 4.08E−03 |
| RS3770899 | 1.05 | 1/3 | 31 | 1.46 | 3/3 | 205 | 1.31 | 5.63 | 2 | 234 | 4.09E−03 |
| RS2241577 | 1.5 | 1/2 | 66 | 1.4 | 2/2 | 166 | 1.3 | 5.62 | 2 | 235 | 4.13E−03 |
| RS10502543 | 1.37 | 1/2 | 98 | 1.39 | 2/2 | 117 | 1.28 | 5.62 | 2 | 234 | 4.13E−03 |
| RS10508405 | 1.32 | 1/3 | 82 | 1.39 | 3/3 | 24 | 1.21 | 5.63 | 2 | 215 | 4.14E−03 |
| RS6776797 | 1.32 | 2/3 | 13 | 1.52 | 0/0 | 0 | 0 | 8.38 | 1 | 239 | 4.14E−03 |
| RS7241410 | 1.36 | 2/3 | 100 | 1.39 | 3/3 | 102 | 1.27 | 5.62 | 2 | 221 | 4.16E−03 |
| RS896043 | 1.5 | 3/4 | 93 | 1.31 | 4/4 | 126 | 1.32 | 5.61 | 2 | 237 | 4.16E−03 |
| RS397405 | 1.47 | 4/4 | 210 | 1.31 | 0/0 | 0 | 0 | 8.37 | 1 | 230 | 4.18E−03 |
| RS2054915 | 1.31 | 1/2 | 125 | 1.38 | 2/2 | 45 | 1.24 | 5.61 | 2 | 228 | 4.18E−03 |
| RS32218 | 1.42 | 2/4 | 67 | 1.41 | 4/4 | 145 | 1.29 | 5.61 | 2 | 222 | 4.20E−03 |
| RS10485828 | 1.06 | 2/3 | 37 | 1.4 | 3/3 | 180 | 1.33 | 5.61 | 2 | 221 | 4.20E−03 |
| RS10495390 | 1.31 | 2/4 | 38 | 1.45 | 4/4 | 3 | 1.43 | 5.6 | 2 | 235 | 4.21E−03 |
| RS7161975 | 1.32 | 2/4 | 36 | 1.45 | 0/0 | 0 | 0 | 8.36 | 1 | 224 | 4.21E−03 |
| RS10510156 | 1.34 | 1/4 | 48 | 1.44 | 4/4 | 174 | 1.3 | 5.6 | 2 | 224 | 4.23E−03 |
| RS615696 | 1.64 | 2/4 | 63 | 1.32 | 4/4 | 155 | 1.32 | 5.6 | 2 | 221 | 4.24E−03 |
| RS10492136 | 1.9 | 2/4 | 33 | 1.3 | 4/4 | 205 | 1.33 | 5.59 | 2 | 237 | 4.24E−03 |
| RS1318822 | 1.26 | 1/3 | 114 | 1.37 | 3/3 | 37 | 1.37 | 5.59 | 2 | 235 | 4.25E−03 |
| RS823986 | 1.39 | 1/3 | 128 | 1.29 | 3/3 | 78 | 1.4 | 5.59 | 2 | 224 | 4.27E−03 |
| RS924159 | 1.3 | 4/4 | 76 | 1.4 | 0/0 | 0 | 0 | 8.32 | 1 | 238 | 4.28E−03 |
| RS10508876 | 1.32 | 2/4 | 27 | 1.48 | 4/4 | 5 | 1.2 | 5.58 | 2 | 234 | 4.29E−03 |
| RS4935712 | 1.31 | 2/4 | 121 | 1.38 | 4/4 | 48 | 1.25 | 5.58 | 2 | 231 | 4.30E−03 |
| RS10497723 | 1.35 | 1/3 | 32 | 1.22 | 0/0 | 0 | 0 | 8.3 | 1 | 237 | 4.33E−03 |
| RS1063964 | 1.4 | 2/4 | 101 | 1.29 | 4/4 | 33 | 1.29 | 5.57 | 2 | 234 | 4.33E−03 |
| RS2169141 | 1.25 | 1/3 | 113 | 1.37 | 3/3 | 60 | 1.35 | 5.57 | 2 | 234 | 4.33E−03 |
| RS10484846 | 1.68 | 2/3 | 50 | 1.34 | 3/3 | 159 | 1.31 | 5.58 | 2 | 211 | 4.35E−03 |
| RS10483541 | 1.55 | 4/4 | 229 | 1.32 | 0/0 | 0 | 0 | 8.29 | 1 | 237 | 4.35E−03 |
| RS9304675 | 1.33 | 2/3 | 111 | 1.29 | 3/3 | 32 | 1.46 | 5.56 | 2 | 236 | 4.37E−03 |
| RS10508895 | 1.11 | 1/3 | 20 | 1.19 | 3/3 | 197 | 1.36 | 5.57 | 2 | 216 | 4.38E−03 |
| RS10494231 | 1.43 | 2/4 | 76 | 1.29 | 4/4 | 72 | 1.29 | 5.58 | 2 | 199 | 4.39E−03 |
| RS1944487 | 1.39 | 1/3 | 119 | 1.28 | 3/3 | 59 | 1.37 | 5.55 | 2 | 238 | 4.41E−03 |
| RS10503056 | 1.37 | 2/4 | 76 | 1.26 | 4/4 | 11 | 1.4 | 5.55 | 2 | 235 | 4.41E−03 |
| RS4578215 | 1.6 | 4/4 | 234 | 1.32 | 0/0 | 0 | 0 | 8.26 | 1 | 239 | 4.42E−03 |
| RS1429130 | 1.32 | 1/3 | 23 | 1.47 | 0/0 | 0 | 0 | 8.25 | 1 | 223 | 4.47E−03 |
| RS1915552 | 1.31 | 1/4 | 128 | 1.38 | 4/4 | 72 | 1.26 | 5.54 | 2 | 230 | 4.47E−03 |
| RS724023 | 1.35 | 1/3 | 28 | 1.2 | 0/0 | 0 | 0 | 8.24 | 1 | 234 | 4.47E−03 |
| RS1993306 | 1.12 | 1/4 | 77 | 1.31 | 4/4 | 142 | 1.36 | 5.54 | 2 | 227 | 4.48E−03 |
| RS2593963 | 1.2 | 2/4 | 100 | 1.37 | 4/4 | 101 | 1.35 | 5.54 | 2 | 226 | 4.48E−03 |
| RS10516142 | 1.32 | 2/4 | 6 | 1.54 | 4/4 | 1 | 1.96 | 5.53 | 2 | 238 | 4.49E−03 |
| RS8076457 | 1.32 | 2/4 | 68 | 1.32 | 4/4 | 8 | 1.61 | 5.53 | 2 | 236 | 4.50E−03 |
| RS522085 | 1.35 | 1/3 | 75 | 1.27 | 3/3 | 11 | 1.5 | 5.53 | 2 | 233 | 4.50E−03 |
| RS7794555 | 1.31 | 2/4 | 32 | 1.45 | 0/0 | 0 | 0 | 8.22 | 1 | 237 | 4.52E−03 |
| RS2014617 | 1.32 | 2/4 | 92 | 1.38 | 4/4 | 12 | 1.15 | 5.52 | 2 | 238 | 4.54E−03 |
| RS10495099 | 1.31 | 2/4 | 39 | 1.45 | 4/4 | 197 | 1.31 | 5.52 | 2 | 236 | 4.54E−03 |
| RS10516865 | 1.33 | 3/4 | 5 | 1.64 | 0/0 | 0 | 0 | 8.2 | 1 | 239 | 4.56E−03 |
| RS935056 | 1.43 | 2/4 | 102 | 1.3 | 4/4 | 74 | 1.29 | 5.52 | 2 | 227 | 4.56E−03 |
| RS1376917 | 1.17 | 4/4 | 221 | 1.34 | 0/0 | 0 | 0 | 8.2 | 1 | 237 | 4.56E−03 |
| RS10498603 | 1.17 | 3/3 | 222 | 1.34 | 0/0 | 0 | 0 | 8.2 | 1 | 237 | 4.56E−03 |
| RS10511729 | 1.33 | 1/2 | 117 | 1.3 | 2/2 | 37 | 1.45 | 5.51 | 2 | 237 | 4.58E−03 |
| RS9323026 | 1.45 | 1/3 | 97 | 1.3 | 3/3 | 84 | 1.32 | 5.52 | 2 | 219 | 4.58E−03 |
| RS2346593 | 1.91 | 1/2 | 14 | 1.31 | 2/2 | 223 | 1.33 | 5.51 | 2 | 236 | 4.58E−03 |
| RS10515985 | 1.37 | 2/4 | 66 | 1.25 | 4/4 | 11 | 1.39 | 5.52 | 2 | 217 | 4.59E−03 |
| RS6966318 | 1.37 | 2/4 | 101 | 1.31 | 4/4 | 24 | 1.2 | 5.51 | 2 | 232 | 4.59E−03 |
| RS987479 | 1.32 | 1/3 | 74 | 1.32 | 3/3 | 11 | 1.56 | 5.51 | 2 | 229 | 4.60E−03 |
| RS10506835 | 1.43 | 2/3 | 85 | 1.27 | 3/3 | 116 | 1.36 | 5.51 | 2 | 220 | 4.62E−03 |
| RS10504742 | 1.31 | 1/4 | 108 | 1.31 | 4/4 | 33 | 1.46 | 5.5 | 2 | 237 | 4.63E−03 |
| RS6134885 | 1.37 | 3/4 | 73 | 1.26 | 4/4 | 8 | 1.49 | 5.51 | 2 | 218 | 4.63E−03 |
| RS4131870 | 1.52 | 2/4 | 74 | 1.29 | 4/4 | 148 | 1.33 | 5.5 | 2 | 235 | 4.63E−03 |
| RS4785953 | 1.31 | 1/3 | 47 | 1.36 | 3/3 | 6 | 1.64 | 5.5 | 2 | 234 | 4.63E−03 |
| RS3847222 | 1.31 | 1/4 | 96 | 1.33 | 4/4 | 16 | 1.52 | 5.49 | 2 | 237 | 4.67E−03 |
| RS3874273 | 1.27 | 1/3 | 98 | 1.37 | 3/3 | 37 | 1.39 | 5.49 | 2 | 228 | 4.69E−03 |
| RS570008 | 1.37 | 3/4 | 116 | 1.28 | 4/4 | 61 | 1.39 | 5.48 | 2 | 237 | 4.71E−03 |
| RS745708 | 1.29 | 1/3 | 59 | 1.41 | 3/3 | 8 | 1.39 | 5.49 | 2 | 210 | 4.74E−03 |
| RS4984442 | 1.29 | 1/3 | 84 | 1.4 | 3/3 | 17 | 1.35 | 5.48 | 2 | 225 | 4.74E−03 |
| RS2973237 | 1.48 | 2/4 | 87 | 1.31 | 4/4 | 112 | 1.32 | 5.48 | 2 | 222 | 4.75E−03 |
| RS10521007 | 1.37 | 2/4 | 71 | 1.27 | 4/4 | 14 | 1.23 | 5.47 | 2 | 238 | 4.76E−03 |
| RS10489117 | 1.73 | 1/2 | 52 | 1.33 | 2/2 | 184 | 1.32 | 5.47 | 2 | 237 | 4.76E−03 |
| RS581277 | 1.69 | 2/4 | 53 | 1.39 | 4/4 | 184 | 1.31 | 5.47 | 2 | 237 | 4.76E−03 |
| RS10489115 | 1.73 | 2/3 | 46 | 1.32 | 3/3 | 189 | 1.32 | 5.47 | 2 | 236 | 4.76E−03 |
| RS162676 | 1.36 | 2/4 | 99 | 1.39 | 4/4 | 123 | 1.28 | 5.47 | 2 | 236 | 4.76E−03 |
| RS3789343 | 1.37 | 1/3 | 78 | 1.25 | 3/3 | 16 | 1.33 | 5.47 | 2 | 232 | 4.77E−03 |
| RS918092 | 1.29 | 3/4 | 68 | 1.4 | 4/4 | 9 | 1.41 | 5.47 | 2 | 226 | 4.79E−03 |
| RS9303878 | 1.34 | 1/4 | 34 | 1.25 | 4/4 | 2 | 1.78 | 5.47 | 2 | 226 | 4.79E−03 |
| RS2078536 | 1.5 | 2/4 | 88 | 1.3 | 4/4 | 101 | 1.34 | 5.48 | 2 | 209 | 4.79E−03 |
| RS2347061 | 1.34 | 1/3 | 5 | 1.06 | 3/3 | 1 | 1.86 | 5.46 | 2 | 238 | 4.80E−03 |
| RS9325124 | 1.4 | 1/3 | 118 | 1.37 | 3/3 | 89 | 1.27 | 5.46 | 2 | 237 | 4.81E−03 |
| RS972432 | 1.79 | 2/3 | 26 | 1.44 | 3/3 | 209 | 1.31 | 5.46 | 2 | 233 | 4.82E−03 |
| RS2209426 | 1.3 | 1/3 | 84 | 1.4 | 3/3 | 11 | 1.26 | 5.45 | 2 | 237 | 4.85E−03 |
| RS1526723 | 1.24 | 2/4 | 115 | 1.39 | 4/4 | 91 | 1.31 | 5.45 | 2 | 234 | 4.86E−03 |
| RS2041442 | 1.32 | 2/4 | 48 | 1.34 | 4/4 | 4 | 1.73 | 5.45 | 2 | 232 | 4.86E−03 |
| RS2357344 | 1.64 | 2/4 | 24 | 1.39 | 4/4 | 183 | 1.31 | 5.46 | 2 | 209 | 4.88E−03 |
| RS10514136 | 1.36 | 1/3 | 36 | 1.21 | 3/3 | 6 | 1.28 | 5.45 | 2 | 209 | 4.93E−03 |
| RS637225 | 1.43 | 2/4 | 97 | 1.32 | 4/4 | 61 | 1.28 | 5.44 | 2 | 210 | 4.97E−03 |
| RS3859990 | 1.31 | 4/4 | 29 | 1.45 | 0/0 | 0 | 0 | 7.8 | 1 | 236 | 5.65E−03 |

[0179] TABLE 7
The most significant haplotype regions for APOA1 based
on HaploRec + HPM analysis.

| RS_id | SEQ_ID_no | Gene | Gene_id | Chr | Position | P-value |
|---|---|---|---|---|---|---|
| RS1016579 | 881 | | | 8 | 129269143 | 1.00E−04 |
| RS10502465 | 2490 | | | 18 | 20848719 | 1.00E−04 |
| RS10508903 | 983 | MAPK8 | 5599 | 10 | 49311338 | 1.00E−04 |
| RS10517832 | 1745 | | | 4 | 63462068 | 1.00E−04 |
| RS1395734 | 1746 | | | 4 | 63540641 | 1.00E−04 |
| RS159375 | 1839 | NDUFA12L | 91942 | 5 | 60469024 | 1.00E−04 |
| RS1941915 | 2499 | | | 18 | 21596530 | 1.00E−04 |
| RS2220486 | 1162 | DKFZp761O2018 | 92293 | 12 | 127658094 | 1.00E−04 |
| RS295525 | 525 | | | 5 | 60508623 | 1.00E−04 |
| RS295577 | 524 | NDUFA12L | 91942 | 5 | 60457592 | 1.00E−04 |
| RS39661 | 1840 | NDUFA12L | 91942 | 5 | 60477844 | 1.00E−04 |
| RS536617 | 2266 | FAT3 | 120114 | 11 | 91943638 | 1.00E−04 |
| RS540248 | 2265 | FAT3 | 120114 | 11 | 91943248 | 1.00E−04 |
| RS665889 | 915 | | | 9 | 86972031 | 1.00E−04 |
| RS7407453 | 2498 | | | 18 | 21567347 | 1.00E−04 |
| RS9297772 | 2167 | | | 8 | 129264644 | 1.00E−04 |
| RS9317818 | 2361 | | | 13 | 68921367 | 1.00E−04 |
| RS10502466 | 2491 | | | 18 | 20853692 | 2.00E−04 |
| RS10507767 | 2358 | | | 13 | 68846283 | 2.00E−04 |
| RS1322177 | 1911 | BMP6 | 654 | 6 | 7755920 | 2.00E−04 |
| RS1330538 | 2362 | | | 13 | 68929072 | 2.00E−04 |
| RS1806083 | 1810 | SEMA5A | 9037 | 5 | 9253348 | 2.00E−04 |
| RS2056247 | 1092 | | | 11 | 93315872 | 2.00E−04 |
| RS2398417 | 1163 | DKFZp761O2018 | 92293 | 12 | 127719497 | 2.00E−04 |
| RS2852861 | 2274 | FAT3 | 120114 | 11 | 92092036 | 2.00E−04 |
| RS4131454 | 2492 | ZNF521 | 25925 | 18 | 21035848 | 2.00E−04 |
| RS4838626 | 2214 | ARHGAP22 | 58504 | 10 | 49443676 | 2.00E−04 |
| RS507575 | 1995 | TPD52L1 | 7164 | 6 | 125559665 | 2.00E−04 |
| RS514096 | 1996 | TPD52L1 | 7164 | 6 | 125569006 | 2.00E−04 |
| RS6874699 | 1830 | ELOVL7 | 79993 | 5 | 60109757 | 2.00E−04 |
| RS965986 | 1994 | TPD52L1 | 7164 | 6 | 125544750 | 2.00E−04 |
| RS10492292 | 2168 | | | 8 | 129272373 | 3.00E−04 |
| RS10495390 | 116 | RYR2 | 6262 | 1 | 235379636 | 3.00E−04 |
| RS10498673 | 1912 | BMP6 | 654 | 6 | 7770256 | 3.00E−04 |
| RS10501795 | 2273 | FAT3 | 120114 | 11 | 92087066 | 3.00E−04 |
| RS10503626 | 808 | PSD3 | 23362 | 8 | 18591364 | 3.00E−04 |
| RS10514906 | 1841 | | | 5 | 60510338 | 3.00E−04 |
| RS1806110 | 1811 | SEMA5A | 9037 | 5 | 9253540 | 3.00E−04 |
| RS295561 | 1838 | NDUFA12L | 91942 | 5 | 60435974 | 3.00E−04 |
| RS4235481 | 1831 | ELOVL7 | 79993 | 5 | 60129144 | 3.00E−04 |
| RS4908087 | 71 | | | 1 | 100861182 | 3.00E−04 |
| RS502357 | 2267 | FAT3 | 120114 | 11 | 91953156 | 3.00E−04 |
| RS534196 | 914 | | | 9 | 86868202 | 3.00E−04 |
| RS724313 | 2488 | | | 18 | 20842927 | 3.00E−04 |
| RS787533 | 10 | | | 1 | 67818897 | 3.00E−04 |
| RS787534 | 11 | | | 1 | 67819113 | 3.00E−04 |
| RS8121515 | 2547 | C20orf133 | 140733 | 20 | 15382681 | 3.00E−04 |
| RS9291696 | 1829 | ELOVL7 | 79993 | 5 | 60100142 | 3.00E−04 |
| RS992241 | 2169 | | | 8 | 129272494 | 3.00E−04 |
| RS10492047 | 1158 | LOC144678 | 144678 | 12 | 125501283 | 4.00E−04 |
| RS10498717 | 624 | | | 6 | 23833783 | 4.00E−04 |
| RS1577340 | 2357 | | | 13 | 68840319 | 4.00E−04 |
| RS1902781 | 2170 | | | 8 | 129283194 | 4.00E−04 |
| RS1941616 | 2487 | | | 18 | 20837040 | 4.00E−04 |
| RS2182068 | 625 | | | 6 | 23845925 | 4.00E−04 |
| RS2208137 | 2546 | C20orf133 | 140733 | 20 | 15373454 | 4.00E−04 |
| RS295565 | 1837 | NDUFA12L | 91942 | 5 | 60433914 | 4.00E−04 |
| RS33924 | 1880 | | | 5 | 129264038 | 4.00E−04 |
| RS3847544 | 2278 | FAT3 | 120114 | 11 | 92219842 | 4.00E−04 |
| RS5007492 | 2500 | | | 18 | 21662551 | 4.00E−04 |
| RS530616 | 1786 | NDST4 | 64579 | 4 | 116202568 | 4.00E−04 |
| RS878016 | 757 | DLGAP2 | 9228 | 8 | 1585693 | 4.00E−04 |
| RS927402 | 1910 | BMP6 | 654 | 6 | 7755224 | 4.00E−04 |
| RS9296540 | 638 | | | 6 | 47418964 | 4.00E−04 |
| RS9296545 | 639 | | | 6 | 47433570 | 4.00E−04 |
| RS959988 | 1164 | SLC15A4 | 121260 | 12 | 127858547 | 4.00E−04 |
| RS975830 | 2337 | LOC144678 | 144678 | 12 | 125501837 | 4.00E−04 |
| RS10518315 | 24 | | | 1 | 69652390 | 5.00E−04 |
| RS1805960 | 1812 | SEMA5A | 9037 | 5 | 9268331 | 5.00E−04 |
| RS1902778 | 2166 | | | 8 | 129264032 | 5.00E−04 |
| RS1998846 | 25 | | | 1 | 69674145 | 5.00E−04 |
| RS2683408 | 1748 | | | 4 | 63554481 | 5.00E−04 |
| RS500409 | 1787 | NDST4 | 64579 | 4 | 116203593 | 5.00E−04 |
| RS540138 | 2268 | FAT3 | 120114 | 11 | 91953442 | 5.00E−04 |
| RS572241 | 2264 | FAT3 | 120114 | 11 | 91942082 | 5.00E−04 |
| RS950964 | 1539 | RYR2 | 6262 | 1 | 235487304 | 5.00E−04 |
| RS964906 | 1500 | | | 1 | 100860067 | 5.00E−04 |
| RS10498293 | 2380 | | | 14 | 27284686 | 6.00E−04 |
| RS10507766 | 2356 | | | 13 | 68838026 | 6.00E−04 |
| RS10520061 | 1881 | CSS3 | 337876 | 5 | 129355287 | 6.00E−04 |
| RS1169429 | 913 | | | 9 | 86853672 | 6.00E−04 |
| RS1994592 | 1653 | FAM19A4 | 151647 | 3 | 68907175 | 6.00E−04 |
| RS2168407 | 2160 | COL14A1 | 7373 | 8 | 121425244 | 6.00E−04 |
| RS2909239 | 2165 | | | 8 | 129261531 | 6.00E−04 |
| RS4418368 | 758 | DLGAP2 | 9228 | 8 | 1585785 | 6.00E−04 |
| RS4765395 | 2338 | LOC144678 | 144678 | 12 | 125519464 | 6.00E−04 |
| RS566388 | 1784 | NDST4 | 64579 | 4 | 116200944 | 6.00E−04 |
| RS6470607 | 2164 | | | 8 | 129255251 | 6.00E−04 |
| RS6938784 | 1947 | | | 6 | 42598500 | 6.00E−04 |
| RS9304495 | 2504 | TAF4B | 6875 | 18 | 22176091 | 6.00E−04 |
| RS10485526 | 2548 | C20orf133 | 140733 | 20 | 15383203 | 7.00E−04 |
| RS10501794 | 2272 | FAT3 | 120114 | 11 | 92082107 | 7.00E−04 |
| RS10508901 | 981 | MAPK8 | 5599 | 10 | 49297404 | 7.00E−04 |
| RS10508902 | 982 | MAPK8 | 5599 | 10 | 49311187 | 7.00E−04 |
| RS1445292 | 1832 | ELOVL7 | 79993 | 5 | 60155879 | 7.00E−04 |
| RS1460959 | 1828 | ELOVL7 | 79993 | 5 | 60100094 | 7.00E−04 |
| RS1806111 | 1809 | SEMA5A | 9037 | 5 | 9253329 | 7.00E−04 |
| RS1893120 | 1788 | NDST4 | 64579 | 4 | 116230217 | 7.00E−04 |
| RS1941619 | 2489 | | | 18 | 20848396 | 7.00E−04 |
| RS1972602 | 2476 | LOC390843 | 390843 | 18 | 20367962 | 7.00E−04 |
| RS2139090 | 2284 | | | 11 | 93363251 | 7.00E−04 |
| RS7407701 | 2497 | | | 18 | 21567062 | 7.00E−04 |
| RS7828096 | 2095 | PSD3 | 23362 | 8 | 18597554 | 7.00E−04 |
| RS1006609 | 2477 | LOC390843 | 390843 | 18 | 20368055 | 8.00E−04 |
| RS10491042 | 2215 | ARHGAP22 | 58504 | 10 | 49444215 | 8.00E−04 |
| RS10493425 | 9 | | | 1 | 67782715 | 8.00E−04 |
| RS10517841 | 1755 | | | 4 | 63584709 | 8.00E−04 |
| RS1427422 | 1660 | | | 3 | 69866955 | 8.00E−04 |
| RS1526211 | 219 | | | 2 | 184719208 | 8.00E−04 |
| RS1946424 | 1659 | | | 3 | 69857899 | 8.00E−04 |
| RS2118763 | 513 | | | 5 | 44823303 | 8.00E−04 |
| RS2297355 | 920 | C9orf125 | 84302 | 9 | 103283578 | 8.00E−04 |
| RS352254 | 2363 | | | 13 | 68937642 | 8.00E−04 |
| RS4122086 | 2271 | FAT3 | 120114 | 11 | 92070494 | 8.00E−04 |
| RS4896783 | 1993 | TPD52L1 | 7164 | 6 | 125539447 | 8.00E−04 |
| RS6074891 | 2545 | C20orf133 | 140733 | 20 | 15363912 | 8.00E−04 |
| RS6938470 | 640 | | | 6 | 47446050 | 8.00E−04 |
| RS723276 | 1836 | NDUFA12L | 91942 | 5 | 60412893 | 8.00E−04 |
| RS7841198 | 2096 | PSD3 | 23362 | 8 | 18597648 | 8.00E−04 |
| RS9287218 | 1538 | RYR2 | 6262 | 1 | 235343721 | 8.00E−04 |
| RS10492048 | 2339 | LOC144678 | 144678 | 12 | 125521407 | 9.00E−04 |
| RS10505380 | 2157 | COL14A1 | 7373 | 8 | 121395654 | 9.00E−04 |
| RS10507765 | 2355 | | | 13 | 68805132 | 9.00E−04 |
| RS1351633 | 512 | | | 5 | 44579608 | 9.00E−04 |
| RS1358091 | 220 | | | 2 | 184735915 | 9.00E−04 |
| RS1360156 | 1954 | | | 6 | 47799167 | 9.00E−04 |
| RS1418005 | 26 | | | 1 | 69720212 | 9.00E−04 |
| RS1547641 | 623 | | | 6 | 23833200 | 9.00E−04 |
| RS1929496 | 921 | | | 9 | 103306774 | 9.00E−04 |
| RS4129501 | 2493 | ZNF521 | 25925 | 18 | 21170719 | 9.00E−04 |
| RS6469916 | 2159 | COL14A1 | 7373 | 8 | 121401972 | 9.00E−04 |
| RS7148166 | 2388 | NUBPL | 80224 | 14 | 31303436 | 9.00E−04 |
| RS722833 | 1332 | GAS7 | 8522 | 17 | 9876974 | 9.00E−04 |
| RS763671 | 2126 | SEC11L2 | 157708 | 8 | 55602883 | 9.00E−04 |
| RS9298506 | 2125 | SEC11L2 | 157708 | 8 | 55600077 | 9.00E−04 |
| RS952938 | 1744 | | | 4 | 63436594 | 9.00E−04 |
| RS967326 | 2094 | PSD3 | 23362 | 8 | 18591541 | 9.00E−04 |
| RS10485116 | 1946 | LOC653802 | 653802 | 6 | 42430492 | 1.00E−03 |
| RS10491272 | 1882 | CSS3 | 337876 | 5 | 129423355 | 1.00E−03 |
| RS10492294 | 2175 | | | 8 | 129315597 | 1.00E−03 |
| RS1586681 | 912 | | | 9 | 86837254 | 1.00E−03 |
| RS1622239 | 2478 | | | 18 | 20386505 | 1.00E−03 |
| RS1945148 | 2479 | | | 18 | 20387524 | 1.00E−03 |
| RS325220 | 1862 | | | 5 | 98332464 | 1.00E−03 |
| RS3799751 | 1997 | TPD52L1 | 7164 | 6 | 125569953 | 1.00E−03 |
| RS4871056 | 2158 | COL14A1 | 7373 | 8 | 121395762 | 1.00E−03 |
| RS6079817 | 2544 | C20orf133 | 140733 | 20 | 15358067 | 1.00E−03 |
| RS6916562 | 1953 | GPR115 | 221393 | 6 | 47789453 | 1.00E−03 |
| RS709386 | 1863 | | | 5 | 98357950 | 1.00E−03 |
| RS725819 | 626 | | | 6 | 23849815 | 1.00E−03 |
| RS7523565 | 12 | | | 1 | 67843580 | 1.00E−03 |
| RS927407 | 1909 | BMP6 | 654 | 6 | 7755127 | 1.00E−03 |
| RS9291707 | 1842 | | | 5 | 60511983 | 1.00E−03 |
| RS970488 | 2389 | NUBPL | 80224 | 14 | 31319837 | 1.00E−03 |
| RS719355 | 1473 | | | 1 | 34628978 | 1.10E−03 |
| RS10483457 | 1232 | GARNL1 | 253959 | 14 | 35211683 | 1.10E−03 |
| RS10493933 | 73 | | | 1 | 100883870 | 1.10E−03 |
| RS10504166 | 2123 | LOC392222 | 392222 | 8 | 55556364 | 1.10E−03 |
| RS10512865 | 514 | | | 5 | 44859124 | 1.10E−03 |
| RS1526212 | 218 | | | 2 | 184719102 | 1.10E−03 |
| RS1981134 | 72 | | | 1 | 100883793 | 1.10E−03 |
| RS2939619 | 2283 | | | 11 | 93356828 | 1.10E−03 |
| RS4546275 | 1757 | | | 4 | 63619250 | 1.10E−03 |
| RS4876117 | 2071 | DLGAP2 | 9228 | 8 | 1589804 | 1.10E−03 |
| RS516638 | 1783 | NDST4 | 64579 | 4 | 116198917 | 1.10E−03 |
| RS6830598 | 1775 | NDST4 | 64579 | 4 | 116084463 | 1.10E−03 |
| RS7239405 | 2515 | | | 18 | 56812039 | 1.10E−03 |
| RS10498294 | 2381 | | | 14 | 27285522 | 1.20E−03 |
| RS10501809 | 2280 | | | 11 | 93305911 | 1.20E−03 |
| RS10501810 | 2281 | | | 11 | 93306237 | 1.20E−03 |
| RS10505004 | 2149 | | | 8 | 102157533 | 1.20E−03 |
| RS1343788 | 1616 | MGC42174 | 129563 | 2 | 232759753 | 1.20E−03 |
| RS2346593 | 1756 | | | 4 | 63606400 | 1.20E−03 |
| RS2503102 | 679 | LOC442238 | 442238 | 6 | 100650488 | 1.20E−03 |
| RS2660589 | 1749 | | | 4 | 63555481 | 1.20E−03 |
| RS2863227 | 1879 | | | 5 | 129250974 | 1.20E−03 |
| RS3116174 | 1615 | MGC42174 | 129563 | 2 | 232717833 | 1.20E−03 |
| RS558868 | 1782 | NDST4 | 64579 | 4 | 116198572 | 1.20E−03 |
| RS6748937 | 221 | | | 2 | 184738190 | 1.20E−03 |
| RS7158021 | 2387 | NUBPL | 80224 | 14 | 31301646 | 1.20E−03 |
| RS7758833 | 1955 | | | 6 | 47799521 | 1.20E−03 |
| RS9285766 | 1488 | | | 1 | 67741313 | 1.20E−03 |
| RS1023080 | 1952 | GPR115 | 221393 | 6 | 47778169 | 1.30E−03 |
| RS10491089 | 1331 | GAS7 | 8522 | 17 | 9828100 | 1.30E−03 |
| RS10498260 | 253 | MGC42174 | 129563 | 2 | 232764865 | 1.30E−03 |
| RS10501811 | 2282 | | | 11 | 93309061 | 1.30E−03 |
| RS10503827 | 814 | | | 8 | 28223645 | 1.30E−03 |
| RS10516607 | 1774 | NDST4 | 66579 | 4 | 116047414 | 1.30E−03 |
| RS2094923 | 1920 | | | 6 | 14397061 | 1.30E−03 |
| RS2278016 | 1308 | | | 16 | 50674510 | 1.30E−03 |
| RS32904 | 916 | | | 9 | 86989232 | 1.30E−03 |
| RS3865407 | 2505 | TAF4B | 6875 | 18 | 22191304 | 1.30E−03 |
| RS4349629 | 1758 | | | 4 | 63640765 | 1.30E−03 |
| RS533950 | 1785 | NDST4 | 64579 | 4 | 116200998 | 1.30E−03 |
| RS929780 | 1833 | ERCC8 | 1161 | 5 | 60224783 | 1.30E−03 |
| RS9298505 | 2124 | SEC11L2 | 157708 | 8 | 55599688 | 1.30E−03 |
| RS9312103 | 1754 | | | 4 | 63584684 | 1.30E−03 |
| RS10491092 | 1333 | GAS7 | 8522 | 17 | 9945918 | 1.40E−03 |
| RS10505507 | 2174 | | | 8 | 129311983 | 1.40E−03 |
| RS10508895 | 2209 | MARCH8 | 220972 | 10 | 45287774 | 1.40E−0 |
| RS10516608 | 1776 | NDST4 | 64579 | 4 | 116085298 | 1.40E−03 |
| RS1121922 | 2093 | PSD3 | 23362 | 8 | 18563312 | 1.40E−03 |
| RS1427421 | 1661 | MITF | 4286 | 3 | 69870404 | 1.40E−03 |
| RS1806004 | 1813 | SEMA5A | 9037 | 5 | 9292427 | 1.40E−03 |
| RS1946425 | 1658 | | | 3 | 69857771 | 1.40E−03 |
| RS1948617 | 2516 | | | 18 | 56819944 | 1.40E−03 |
| RS2019441 | 2496 | | | 18 | 21451878 | 1.40E−03 |
| RS2876349 | 1919 | | | 6 | 14354510 | 1.40E−03 |
| RS4981122 | 2386 | NUBPL | 80224 | 14 | 31270802 | 1.40E−03 |
| RS535043 | 1543 | | | 1 | 236762659 | 1.40E−03 |
| RS853392 | 1918 | | | 6 | 14302577 | 1.40E−03 |
| RS861209 | 1917 | | | 6 | 14302443 | 1.40E−03 |
| RS1013997 | 2269 | FAT3 | 120114 | 11 | 91957013 | 1.50E−03 |
| RS10491854 | 948 | | | 9 | 119414301 | 1.50E−03 |
| RS10517411 | 1723 | KIAA1239 | 57495 | 4 | 37068999 | 1.50E−03 |
| RS1324673 | 622 | | | 6 | 23820609 | 1.50E−03 |
| RS2898481 | 2097 | PSD3 | 23362 | 8 | 18598158 | 1.50E−03 |
| RS6079838 | 2549 | C20orf133 | 140733 | 20 | 15383756 | 1.50E−03 |
| RS6601422 | 2082 | MSRA | 4482 | 8 | 10147444 | 1.50E−03 |
| RS6673250 | 1546 | | | 1 | 236842031 | 1.50E−03 |
| RS7823735 | 2150 | | | 8 | 102189451 | 1.50E−03 |
| RS9296387 | 1948 | | | 6 | 42610292 | 1.50E−03 |
| RS998359 | 1777 | NDST4 | 64579 | 4 | 116090480 | 1.50E−03 |
| RS10493456 | 23 | | | 1 | 69651697 | 1.60E−03 |
| RS1919447 | 1593 | | | 2 | 148179334 | 1.60E−03 |
| RS2130437 | 1652 | FAM19A4 | 151647 | 3 | 68906766 | 1.60E−03 |
| RS7001766 | 2131 | | | 8 | 73285827 | 1.60E−03 |
| RS7773311 | 1951 | GPR115 | 221393 | 6 | 47777445 | 1.60E−03 |
| RS7838059 | 2083 | MSRA | 4482 | 8 | 10216220 | 1.60E−03 |
| RS10491855 | 947 | | | 9 | 119335541 | 1.70E−03 |
| RS10498295 | 2382 | | | 14 | 27285584 | 1.70E−03 |
| RS10501813 | 2285 | | | 11 | 93375645 | 1.70E−03 |
| RS10502464 | 2486 | | | 18 | 20821256 | 1.70E−03 |
| RS10502475 | 1376 | KCTD1 | 284252 | 18 | 22427942 | 1.70E−03 |
| RS10512855 | 511 | | | 5 | 44546969 | 1.70E−03 |
| RS1379782 | 1161 | | | 12 | 127624822 | 1.70E−03 |
| RS158935 | 1834 | ERCC8 | 1161 | 5 | 60273741 | 1.70E−03 |
| RS279511 | 1781 | NDST4 | 64579 | 4 | 116125572 | 1.70E−03 |
| RS2949865 | 2286 | HEPHL1 | 341208 | 11 | 93394880 | 1.70E−03 |
| RS3116231 | 252 | MGC42174 | 129563 | 2 | 232600527 | 1.70E−03 |
| RS509423 | 1789 | | | 4 | 116280778 | 1.70E−03 |
| RS10483458 | 2397 | GARNL1 | 253959 | 14 | 35290074 | 1.80E−03 |
| RS10498296 | 2383 | | | 14 | 27308301 | 1.80E−03 |
| RS10503624 | 2092 | PSD3 | 23362 | 8 | 18562990 | 1.80E−03 |
| RS10504534 | 2130 | | | 8 | 73285243 | 1.80E−03 |
| RS10517214 | 343 | | | 4 | 47955582 | 1.80E−03 |
| RS1252144 | 1537 | | | 1 | 235219020 | 1.80E−03 |
| RS2346649 | 1753 | | | 4 | 63584319 | 1.80E−03 |
| RS242687 | 2518 | | | 18 | 56917055 | 1.80E−03 |
| RS2722897 | 815 | PNOC | 5368 | 8 | 28229116 | 1.80E−03 |
| RS2820211 | 1544 | | | 1 | 236767330 | 1.80E−03 |
| RS2874941 | 2104 | FZD3 | 7976 | 8 | 28429267 | 1.80E−03 |
| RS586565 | 1545 | | | 1 | 236825154 | 1.80E−03 |
| RS7835350 | 2176 | | | 8 | 129331257 | 1.80E−03 |
| RS870241 | 1654 | FAM19A4 | 151647 | 3 | 68908072 | 1.80E−03 |
| RS1019384 | 2517 | | | 18 | 56879341 | 1.90E−03 |
| RS10497645 | 222 | | | 2 | 184738537 | 1.90E−03 |
| RS2101435 | 254 | MGC42174 | 129563 | 2 | 232823402 | 1.90E−03 |
| RS2221268 | 1864 | | | 5 | 98385315 | 1.90E−03 |
| RS2326994 | 1908 | BMP6 | 654 | 6 | 7755020 | 1.90E−03 |
| RS2333183 | 2384 | | | 14 | 27367061 | 1.90E−03 |
| RS2346648 | 1752 | | | 4 | 63578452 | 1.90E−03 |
| RS2435307 | 1371 | NPC1 | 4864 | 18 | 19381908 | 1.90E−03 |
| RS3958881 | 2077 | | | 8 | 8939389 | 1.90E−03 |
| RS4981894 | 2385 | NUBPL | 80224 | 14 | 31270542 | 1.90E−03 |
| RS538042 | 1998 | TPD52L1 | 7164 | 6 | 125575909 | 1.90E−03 |
| RS7821424 | 2171 | | | 8 | 129284834 | 1.90E−03 |
| RS9283955 | 2173 | | | 8 | 129288987 | 1.90E−03 |
| RS9298203 | 2129 | | | 8 | 73270276 | 1.90E−03 |
| RS10497651 | 217 | | | 2 | 184701354 | 2.00E−03 |
| RS10503829 | 2103 | FBXO16 | 157574 | 8 | 28389213 | 2.00E−03 |
| RS10516601 | 1773 | NDST4 | 64579 | 4 | 116046280 | 2.00E−03 |
| RS1112268 | 978 | | | 10 | 49217160 | 2.00E−03 |
| RS1460958 | 1827 | ELOVL7 | 79993 | 5 | 60099333 | 2.00E−03 |
| RS1528842 | 209 | | | 2 | 148174046 | 2.00E−03 |
| RS1585920 | 1768 | | | 4 | 80146392 | 2.00E−03 |
| RS1806112 | 1808 | SEMA5A | 9037 | 5 | 9253137 | 2.00E−03 |
| RS276650 | 2132 | | | 8 | 73299514 | 2.00E−03 |
| RS33350 | 1307 | | | 16 | 50608803 | 2.00E−03 |
| RS7009724 | 2078 | | | 8 | 8976535 | 2.00E−03 |
| RS798075 | 1471 | | | 1 | 34709579 | 2.00E−03 |
| RS963291 | 1878 | | | 5 | 129230116 | 2.00E−03 |
| RS10489547 | 27 | | | 1 | 69741665 | 2.10E−03 |
| RS10491274 | 1883 | CSS3 | 337876 | 5 | 129446258 | 2.10E−03 |
| RS10497020 | 1592 | | | 2 | 148173995 | 2.10E−03 |
| RS10502474 | 2506 | TAF4B | 6875 | 18 | 22198825 | 2.10E−03 |
| RS2107191 | 1934 | | | 6 | 29542274 | 2.10E−03 |
| RS2704404 | 342 | | | 4 | 47929301 | 2.10E−03 |
| RS6893752 | 1835 | NDUFA12L | 91942 | 5 | 60410669 | 2.10E−03 |
| RS787494 | 13 | | | 1 | 67858174 | 2.10E−03 |
| RS9287889 | 1606 | STK39 | 27347 | 2 | 168548700 | 2.10E−03 |
| RS10495392 | 1540 | RYR2 | 6262 | 1 | 235489612 | 2.20E−03 |
| RS10510207 | 1620 | CNTN6 | 27255 | 3 | 1309530 | 2.20E−03 |
| RS1480714 | 1767 | | | 4 | 80145855 | 2.20E−03 |
| RS260225 | 1945 | LOC653802 | 563802 | 6 | 42427285 | 2.20E−03 |
| RS6954679 | 728 | | | 7 | 63134099 | 2.20E−03 |
| RS798074 | 1472 | | | 1 | 34709939 | 2.20E−03 |
| RS798076 | 1470 | | | 1 | 34709155 | 2.20E−03 |
| RS10492133 | 2310 | GRIN2B | 2904 | 12 | 13726080 | 2.30E−03 |
| RS10508896 | 2210 | MARCH8 | 220972 | 10 | 45350649 | 2.30E−03 |
| RS10511379 | 1687 | LOC389142 | 389142 | 3 | 119645081 | 2.30E−03 |
| RS411331 | 1621 | CNTN6 | 27255 | 3 | 1320563 | 2.30E−03 |
| RS7349908 | 1932 | | | 6 | 29505500 | 2.30E−03 |
| RS9295805 | 1933 | | | 6 | 29505758 | 2.30E−03 |
| RS1033017 | 188 | MALL | 7851 | 2 | 110210510 | 2.40E−03 |
| RS10484547 | 1935 | | | 6 | 29560753 | 2.40E−03 |
| RS10502440 | 1372 | LAMA3 | 3909 | 18 | 19583575 | 2.40E−03 |
| RS10510270 | 1628 | | | 3 | 3542685 | 2.40E−03 |
| RS10517410 | 1722 | KIAA1239 | 57495 | 4 | 37045599 | 2.40E−03 |
| RS10517842 | 1759 | | | 4 | 63641655 | 2.40E−03 |
| RS1881740 | 979 | | | 10 | 49221566 | 2.40E−03 |
| RS1926256 | 22 | | | 1 | 69651662 | 2.40E−03 |
| RS2059232 | 1306 | | | 16 | 50596704 | 2.40E−03 |
| RS6458297 | 1950 | UBR2 | 23304 | 6 | 42655869 | 2.40E−03 |
| RS723733 | 2151 | | | 8 | 102196496 | 2.40E−03 |
| RS959987 | 1165 | SLC15A4 | 121260 | 12 | 127858753 | 2.40E−03 |
| RS10492049 | 2340 | PGBD3P3 | 267007 | 12 | 125558842 | 2.50E−03 |
| RS10497017 | 208 | | | 2 | 148158282 | 2.50E−03 |
| RS10501793 | 2270 | FAT3 | 120114 | 11 | 91957395 | 2.50E−03 |
| RS10501798 | 2279 | FAT3 | 120114 | 11 | 92224523 | 2.50E−03 |
| RS10518211 | 365 | | | 4 | 80156089 | 2.50E−03 |
| RS185266 | 1305 | | | 16 | 50595102 | 2.50E−03 |
| RS4715005 | 641 | | | 6 | 47472916 | 2.50E−03 |
| RS906648 | 1582 | LRP1B | 53353 | 2 | 142204999 | 2.50E−03 |
| RS9296538 | 637 | | | 6 | 47302408 | 2.50E−03 |
| RS9321873 | 1975 | LOC442238 | 442238 | 6 | 100642690 | 2.50E−03 |
| RS10486529 | 2034 | PTHB1 | 27241 | 7 | 33363277 | 2.60E−03 |
| RS10491088 | 1330 | GAS7 | 8522 | 17 | 9808904 | 2.60E−03 |
| RS10492134 | 2311 | GRIN2B | 2904 | 12 | 13750149 | 2.60E−03 |
| RS10508900 | 977 | FRMPD2 | 143162 | 10 | 49126059 | 2.60E−03 |
| RS10510170 | 1623 | CNTN6 | 27255 | 3 | 1349976 | 2.60E−03 |
| RS10510269 | 1627 | | | 3 | 3542361 | 2.60E−03 |
| RS10510991 | 1662 | MITF | 4286 | 3 | 69924318 | 2.60E−03 |
| RS1233493 | 1936 | LOC442195 | 442195 | 6 | 29566220 | 2.60E−03 |
| RS1785741 | 2501 | | | 18 | 21676577 | 2.60E−03 |
| RS1792624 | 2288 | | | 11 | 93561458 | 2.60E−03 |
| RS6878136 | 1865 | | | 5 | 98386091 | 2.60E−03 |
| RS7107851 | 2287 | HEPHL1 | 341208 | 11 | 93396703 | 2.60E−03 |
| RS779609 | 1686 | LOC389142 | 389142 | 3 | 119539208 | 2.60E−03 |
| RS787493 | 14 | | | 1 | 67858307 | 2.60E−03 |
| RS10493424 | 1487 | | | 1 | 67729796 | 2.70E−03 |
| RS10503167 | 2070 | DLGAP2 | 9228 | 8 | 1585073 | 2.70E−03 |
| RS10512866 | 515 | | | 5 | 44859710 | 2.70E−03 |
| RS1073251 | 1594 | | | 2 | 148179531 | 2.70E−03 |
| RS1499976 | 1684 | LOC389142 | 389142 | 3 | 119284020 | 2.70E−03 |
| RS2150738 | 919 | C9orf125 | 84302 | 9 | 103280529 | 2.70E−03 |
| RS4072525 | 2177 | | | 8 | 129424336 | 2.70E−03 |
| RS7837478 | 2133 | | | 8 | 73323698 | 2.70E−03 |
| RS862527 | 1916 | | | 6 | 14281843 | 2.70E−03 |
| RS901682 | 2208 | MARCH8 | 220972 | 10 | 45285867 | 2.70E−03 |
| RS10496435 | 189 | NPHP1 | 4867 | 2 | 110286462 | 2.80E−03 |
| RS10517407 | 1720 | KIAA1239 | 57495 | 4 | 36977725 | 2.80E−03 |
| RS2165543 | 1780 | NDST4 | 64579 | 4 | 116108687 | 2.80E−03 |
| RS2345475 | 1726 | | | 4 | 42443300 | 2.80E−03 |
| RS2346645 | 1751 | | | 4 | 63565257 | 2.80E−03 |
| RS3772295 | 1622 | CNTN6 | 27255 | 3 | 1349539 | 2.80E−03 |
| RS3844028 | 74 | | | 1 | 100884203 | 2.80E−03 |
| RS723804 | 2437 | | | 15 | 34258962 | 2.80E−03 |
| RS4570241 | 950 | | | 9 | 119436799 | 2.90E−03 |
| RS10511378 | 1688 | LOC389142 | 389142 | 3 | 119645313 | 2.90E−03 |
| RS10512895 | 1693 | TMEM108 | 66000 | 3 | 134498594 | 2.90E−03 |
| RS10518856 | 2438 | | | 15 | 34262252 | 2.90E−03 |
| RS1926289 | 16 | | | 1 | 68238520 | 2.90E−03 |
| RS489743 | 1944 | LOC653802 | 653802 | 6 | 42420978 | 2.90E−03 |
| RS723734 | 2152 | | | 8 | 102196618 | 2.90E−03 |
| RS9312699 | 349 | | | 4 | 59070339 | 2.90E−03 |
| RS10516609 | 1790 | | | 4 | 116303938 | 3.00E−03 |
| RS1360922 | 2348 | | | 13 | 37525010 | 3.00E−03 |
| RS1708370 | 1694 | TMEM108 | 66000 | 3 | 134499004 | 3.00E−03 |
| RS2817738 | 1927 | | | 6 | 24899079 | 3.00E−03 |
| RS4123791 | 2172 | | | 8 | 129288419 | 3.00E−03 |
| RS479600 | 918 | | | 9 | 103242624 | 3.00E−03 |
| RS9289439 | 1690 | TMEM108 | 66000 | 3 | 134343341 | 3.00E−03 |
| RS10484893 | 1931 | | | 6 | 24996530 | 3.10E−03 |
| RS10510271 | 1629 | | | 3 | 3546367 | 3.10E−03 |
| RS1825024 | 1765 | | | 4 | 80126223 | 3.10E−03 |
| RS1851006 | 1278 | UNC13C | 440279 | 15 | 52691684 | 3.10E−03 |
| RS1986511 | 1741 | | | 4 | 59062390 | 3.10E−03 |
| RS2250286 | 2347 | | | 13 | 37480178 | 3.10E−03 |
| RS3790888 | 1495 | LPHN2 | 23266 | 1 | 82185299 | 3.10E−03 |
| RS3790889 | 1494 | LPHN2 | 23266 | 1 | 82185188 | 3.10E−03 |
| RS9312101 | 1750 | | | 4 | 63564480 | 3.10E−03 |
| RS1013985 | 949 | | | 9 | 119414729 | 3.20E−03 |
| RS10493703 | 1493 | LPHN2 | 23266 | 1 | 82158504 | 3.20E−03 |
| RS10510272 | 1630 | | | 3 | 3546420 | 3.20E−03 |
| RS1598052 | 1740 | | | 4 | 59055920 | 3.20E−03 |
| RS407486 | 2543 | C20orf133 | 140733 | 20 | 15355876 | 3.20E−03 |
| RS4538379 | 1651 | | | 3 | 68834680 | 3.20E−03 |
| RS724815 | 2375 | | | 14 | 25666000 | 3.20E−03 |
| RS7599108 | 1617 | MGC42174 | 129563 | 2 | 232845842 | 3.20E−03 |
| RS8094618 | 2485 | | | 18 | 20816188 | 3.20E−03 |
| RS10486527 | 2033 | PTHB1 | 27241 | 7 | 33347198 | 3.30E−03 |
| RS10497642 | 216 | | | 2 | 184536677 | 3.30E−03 |
| RS10517409 | 1721 | KIAA1239 | 57495 | 4 | 37038537 | 3.30E−03 |
| RS10517440 | 1739 | | | 4 | 59051560 | 3.30E−03 |
| RS10517830 | 1743 | | | 4 | 63388819 | 3.30E−03 |
| RS10518659 | 1496 | LPHN2 | 23266 | 1 | 82187284 | 3.30E−03 |
| RS2347027 | 2336 | LOC144678 | 1446768 | 12 | 125501130 | 3.30E−03 |
| RS2378672 | 911 | NTRK2 | 4915 | 9 | 86820854 | 3.30E−03 |
| RS352427 | 816 | | | 8 | 28571996 | 3.30E−03 |
| RS385367 | 1497 | LPHN2 | 23266 | 1 | 82187787 | 3.30E−03 |
| RS809663 | 1685 | LOC389142 | 389142 | 3 | 119537598 | 3.30E−03 |
| RS896990 | 251 | MGC42174 | 129563 | 2 | 232597100 | 3.30E−03 |
| RS10495394 | 1541 | RYR2 | 6262 | 1 | 235498128 | 3.40E−03 |
| RS10504002 | 2118 | | | 8 | 37209534 | 3.40E−03 |
| RS10510268 | 1626 | | | 3 | 3539506 | 3.40E−03 |
| RS1825023 | 1766 | | | 4 | 80126286 | 3.40E−03 |
| RS2670876 | 2182 | DDEF1 | 50807 | 8 | 131339068 | 3.40E−03 |
| RS634403 | 1542 | | | 1 | 236762603 | 3.40E−03 |
| RS745708 | 976 | FRMPD2 | 143162 | 10 | 49115681 | 3.40E−03 |
| RS9297962 | 2145 | | | 8 | 96655791 | 3.40E−03 |
| RS942662 | 627 | | | 6 | 23850282 | 3.40E−03 |
| RS10503389 | 2079 | | | 8 | 8977133 | 3.50E−03 |
| RS10515286 | 1866 | | | 5 | 98464219 | 3.50E−03 |
| RS10518853 | 2436 | | | 15 | 34221604 | 3.50E−03 |
| RS1549455 | 2181 | DDEF1 | 50807 | 8 | 131334202 | 3.50E−03 |
| RS1908691 | 2316 | | | 12 | 29249400 | 3.50E−03 |
| RS2183248 | 1956 | | | 6 | 47807084 | 3.50E−03 |
| RS2590386 | 980 | | | 10 | 49255436 | 3.50E−03 |
| RS4371983 | 2127 | SEC11L2 | 157708 | 8 | 5503190 | 3.50E−03 |
| RS4655769 | 18 | | | 1 | 68249566 | 3.50E−03 |
| RS6900726 | 1949 | UBR2 | 23304 | 6 | 42639628 | 3.50E−03 |
| RS962215 | 2377 | | | 14 | 25707678 | 3.50E−03 |
| RS10483459 | 2398 | GARNL1 | 253959 | 14 | 35290406 | 3.60E−03 |
| RS10505519 | 2178 | | | 8 | 129493979 | 3.60E−03 |
| RS10505548 | 2183 | DDEF1 | 50807 | 8 | 131339636 | 3.60E−03 |
| RS10512891 | 1691 | TMEM108 | 66000 | 3 | 134431549 | 3.60E−03 |
| RS1529585 | 1663 | MITF | 4286 | 3 | 69953285 | 3.60E−03 |
| RS2425570 | 2554 | PTPRT | 11122 | 20 | 41111765 | 3.60E−03 |
| RS2474263 | 678 | LOC442238 | 442238 | 6 | 100641976 | 3.60E−03 |
| RS948435 | 1373 | LAMA3 | 3909 | 18 | 19637770 | 3.60E−03 |
| RS978313 | 17 | | | 1 | 68249062 | 3.60E−03 |
| RS1801758 | 1329 | GAS7 | 8522 | 17 | 9756951 | 3.70E−03 |
| RS10483312 | 2376 | | | 14 | 25681375 | 3.70E−03 |
| RS10517050 | 1728 | | | 4 | 42443702 | 3.70E−03 |
| RS1893290 | 1374 | LAMA3 | 3909 | 18 | 19696619 | 3.70E−03 |
| RS2060639 | 1692 | TMEM108 | 66000 | 3 | 134454348 | 3.70E−03 |
| RS2575517 | 1729 | | | 4 | 42496076 | 3.70E−03 |
| RS3874273 | 2434 | | | 15 | 34183438 | 3.70E−03 |
| RS7970144 | 2308 | GRIN2B | 2904 | 12 | 13724212 | 3.70E−03 |
| RS10504953 | 2144 | | | 8 | 96643015 | 3.80E−03 |
| RS10516125 | 1893 | | | 5 | 174413439 | 3.80E−03 |
| RS10517049 | 1727 | | | 4 | 42443415 | 3.80E−03 |
| RS1369592 | 2435 | | | 15 | 34185952 | 3.80E−03 |
| RS1450917 | 1730 | | | 4 | 42513998 | 3.80E−03 |
| RS4128165 | 457 | GLRA3 | 8001 | 4 | 175810278 | 3.80E−03 |
| RS4695953 | 459 | GLRA3 | 8001 | 4 | 175868286 | 3.80E−03 |
| RS6531533 | 1724 | KIAA1239 | 57495 | 4 | 37071908 | 3.80E−03 |
| RS7037164 | 2198 | | | 9 | 120331565 | 3.80E−03 |
| RS863660 | 2346 | | | 13 | 37470769 | 3.80E−03 |
| RS10518953 | 2443 | LOC390576 | 390576 | 15 | 35569758 | 3.90E−03 |
| RS1430745 | 19 | | | 1 | 68319321 | 3.90E−03 |
| RS171302 | 2108 | | | 8 | 28578345 | 3.90E−03 |
| RS2366659 | 1703 | FGF12 | 2257 | 3 | 193570445 | 3.90E−03 |
| RS273759 | 2495 | | | 18 | 21450194 | 3.90E−03 |
| RS2863171 | 1074 | | | 11 | 45207308 | 3.90E−03 |
| RS484510 | 1992 | TPD52L1 | 7164 | 6 | 125528599 | 3.90E−03 |
| RS548825 | 21 | | | 1 | 69624206 | 3.90E−03 |
| RS817504 | 1679 | | | 3 | 119161552 | 3.90E−03 |
| RS9287324 | 1585 | LRP1B | 53353 | 2 | 142232977 | 3.90E−03 |
| RS10498292 | 1229 | | | 14 | 27284462 | 4.00E−03 |
| RS10518952 | 2442 | | | 15 | 35567312 | 4.00E−03 |
| RS1908690 | 2317 | | | 12 | 29249561 | 4.00E−03 |
| RS2474149 | 1930 | | | 6 | 24993358 | 4.00E−03 |
| RS4694890 | 341 | TEC | 7006 | 4 | 47921024 | 4.00E−03 |
| RS7143770 | 2407 | | | 14 | 43899026 | 4.00E−03 |
| RS797054 | 1642 | GADL1 | 339896 | 3 | 30776179 | 4.00E−03 |
| RS10505005 | 2148 | | | 8 | 102085828 | 4.10E−03 |
| RS2863161 | 2253 | PRDM11 | 56981 | 11 | 45178266 | 4.10E−03 |
| RS6601438 | 2084 | MSRA | 4482 | 8 | 10217077 | 4.10E−03 |
| RS10503511 | 2085 | | | 8 | 14569194 | 4.20E−03 |
| RS10503621 | 2090 | PSD3 | 23362 | 8 | 18512468 | 4.20E−03 |
| RS10512854 | 510 | | | 5 | 44546854 | 4.20E−03 |
| RS1467596 | 605 | FLJ33708 | 285780 | 6 | 6360933 | 4.20E−03 |
| RS1493866 | 2454 | | | 16 | 17822257 | 4.20E−03 |
| RS2894508 | 2180 | DDEF1 | 50807 | 8 | 131314769 | 4.20E−03 |
| RS295546 | 1843 | | | 5 | 60523429 | 4.20E−06 |
| RS4132476 | 2197 | | | 9 | 120318112 | 4.20E−03 |
| RS540970 | 1377 | KCTD1 | 284252 | 18 | 22430481 | 4.20E−03 |
| RS7653241 | 1624 | CNTN6 | 27255 | 3 | 1371414 | 4.20E−03 |
| RS1046852 | 20 | C1orf139 | 79971 | 1 | 68363692 | 4.30E−03 |
| RS10495524 | 126 | | | 2 | 5848753 | 4.30E−03 |
| RS10495525 | 129 | | | 2 | 5904629 | 4.30E−03 |
| RS10496894 | 1584 | LRP1B | 53353 | 2 | 142222836 | 4.30E−03 |
| RS1366236 | 586 | GLRA1 | 2741 | 5 | 151264796 | 4.30E−03 |
| RS1525912 | 1704 | FGF12 | 2257 | 3 | 193571552 | 4.30E−03 |
| RS1874069 | 1742 | | | 4 | 59070504 | 4.30E−03 |
| RS1912163 | 340 | TEC | 7006 | 4 | 47905410 | 4.30E−03 |
| RS2458349 | 1105 | | | 11 | 105805096 | 4.30E−03 |
| RS2887526 | 1868 | | | 5 | 98552712 | 4.30E−03 |
| RS6030634 | 2555 | PTPRT | 11122 | 20 | 41140415 | 4.30E−03 |
| RS6074898 | 2550 | C20orf133 | 140733 | 20 | 15384002 | 4.30E−03 |
| RS9284299 | 1277 | UNC13C | 440279 | 15 | 52685923 | 4.30E−03 |
| RS10496893 | 1583 | LRP1B | 53353 | 2 | 142222200 | 4.40E−03 |
| RS10503622 | 2091 | PSD3 | 23362 | 8 | 18513029 | 4.40E−03 |
| RS10506055 | 1119 | | | 12 | 30097508 | 4.40E−03 |
| RS10510640 | 1644 | GADL1 | 339896 | 3 | 30857035 | 4.40E−03 |
| RS10516126 | 1894 | | | 5 | 174414039 | 4.40E−03 |
| RS1352058 | 458 | GLRA3 | 8001 | 4 | 175842980 | 4.40E−03 |
| RS7588808 | 1589 | | | 2 | 145578357 | 4.40E−03 |
| RS10505379 | 2156 | COL14A1 | 7373 | 8 | 121395608 | 4.50E−03 |
| RS1353447 | 2240 | | | 11 | 14988673 | 4.50E−03 |
| RS1501622 | 1705 | FGF12 | 2257 | 3 | 193634069 | 4.50E−03 |
| RS1818704 | 1274 | UNC13C | 440279 | 15 | 52679696 | 4.50E−03 |
| RS2485488 | 2345 | | | 13 | 37441039 | 4.50E−03 |
| RS3782513 | 2318 | PTX1 | 51290 | 12 | 29397521 | 4.50E−03 |
| RS4660275 | 1479 | | | 1 | 44617545 | 4.50E−03 |
| RS581187 | 2114 | | | 8 | 37119893 | 4.50E−03 |
| RS8009199 | 2408 | | | 14 | 43947540 | 4.50E−03 |
| RS9324714 | 585 | GLRA1 | 2741 | 5 | 151223956 | 4.50E−03 |
| RS949355 | 2480 | | | 18 | 20419693 | 4.50E−03 |
| RS10483313 | 2378 | | | 14 | 25709526 | 4.60E−03 |
| RS10492383 | 2319 | PTX1 | 51290 | 12 | 29419862 | 4.60E−03 |
| RS10503831 | 2107 | | | 8 | 28542929 | 4.60E−03 |
| RS10506057 | 1120 | | | 12 | 30159671 | 4.60E−03 |
| RS1441638 | 1778 | NDST4 | 64579 | 4 | 116094415 | 4.60E−03 |
| RS176379 | 2552 | PTPRT | 11122 | 20 | 40898608 | 4.60E−03 |
| RS1912126 | 1588 | | | 2 | 145568461 | 4.60E−03 |
| RS2274822 | 1921 | | | 6 | 14399068 | 4.60E−03 |
| RS295543 | 1844 | | | 5 | 60524136 | 4.60E−03 |
| RS6493693 | 1275 | UNC13C | 440279 | 15 | 52679875 | 4.60E−03 |
| RS10500396 | 2455 | | | 16 | 17948935 | 4.70E−03 |
| RS2681962 | 1276 | UNC13C | 440279 | 15 | 52685879 | 4.70E−03 |
| RS3758729 | 2252 | PRDM11 | 56981 | 11 | 45165411 | 4.70E−03 |
| RS3790557 | 1486 | SERBP1 | 26135 | 1 | 67657985 | 4.70E−03 |
| RS4583980 | 1929 | C6orf32 | 9750 | 6 | 24954242 | 4.70E−03 |
| RS953816 | 2294 | | | 11 | 105793764 | 4.70E−03 |
| RS1860066 | 1884 | CSS3 | 337876 | 5 | 129475223 | 4.80E−03 |
| RS1993306 | 1555 | LTBP1 | 4052 | 2 | 33299839 | 4.80E−03 |
| RS242695 | 2519 | | | 18 | 56920646 | 4.80E−03 |
| RS4981309 | 2399 | BRMS1L | 84312 | 14 | 35374119 | 4.80E−03 |
| RS532022 | 2116 | | | 8 | 37194096 | 4.80E−03 |
| RS755043 | 2223 | | | 10 | 79780432 | 4.80E−03 |
| RS9317821 | 2364 | | | 13 | 69008405 | 4.80E−03 |
| RS9326628 | 190 | | | 2 | 110323956 | 4.80E−03 |
| RS10484178 | 2409 | | | 14 | 43966379 | 4.90E−03 |
| RS10512876 | 516 | | | 5 | 45285361 | 4.90E−03 |
| RS3866642 | 1480 | C1orf164 | 55182 | 1 | 44658509 | 4.90E−03 |
| RS4695357 | 339 | TEC | 7006 | 4 | 47893952 | 4.90E−03 |
| RS6792186 | 1645 | GADL1 | 339896 | 3 | 30867723 | 4.90E−03 |
| RS7767578 | 1903 | FLJ33708 | 285780 | 6 | 6354844 | 4.90E−03 |
| RS10483456 | 2396 | GARNL1 | 253959 | 14 | 35105918 | 5.00E−03 |
| RS10506054 | 1118 | | | 12 | 30096174 | 5.00E−03 |
| RS1391340 | 2514 | | | 18 | 56778284 | 5.00E−03 |
| RS1541081 | 1905 | FLJ33708 | 285780 | 6 | 6364910 | 5.00E−03 |
| RS2272709 | 2072 | LOC644668 | 644668 | 8 | 1804452 | 5.00E−03 |
| RS2278667 | 852 | | | 8 | 80877490 | 5.00E−03 |
| RS4605931 | 1904 | FLJ33708 | 285780 | 6 | 6360586 | 5.00E−03 |
| RS6992703 | 850 | | | 8 | 80831834 | 5.00E−03 |
| RS7748118 | 1906 | FLJ33708 | 285780 | 6 | 6401019 | 5.00E−03 |
| RS989901 | 922 | | | 9 | 103307086 | 5.00E−03 |
| RS10503512 | 2086 | | | 8 | 14592917 | 5.10E−03 |
| RS1072769 | 1117 | | | 12 | 30067073 | 5.10E−03 |
| RS1342501 | 2196 | | | 9 | 120196645 | 5.10E−03 |
| RS1346612 | 128 | | | 2 | 5903374 | 5.10E−03 |
| RS1393749 | 1643 | GADL1 | 339896 | 3 | 30823369 | 5.10E−03 |
| RS1394615 | 1896 | | | 5 | 174448238 | 5.10E−03 |
| RS2353296 | 1733 | | | 4 | 47956320 | 5.10E−03 |
| RS2979710 | 849 | | | 8 | 80814997 | 5.10E−03 |
| RS10504709 | 848 | | | 8 | 80781919 | 5.20E−03 |
| RS10513331 | 2195 | | | 9 | 120180459 | 5.20E−03 |
| RS1429235 | 127 | | | 2 | 5876965 | 5.20E−03 |
| RS2294591 | 2553 | PTPRT | 11122 | 20 | 41066497 | 5.20E−03 |
| RS4739483 | 2117 | | | 8 | 37195876 | 5.20E−03 |
| RS7580778 | 187 | | | 2 | 109757112 | 5.20E−03 |
| RS7850478 | 946 | | | 9 | 119326659 | 5.20E−03 |
| RS10486526 | 2031 | PTHB1 | 27241 | 7 | 33301917 | 5.30E−03 |
| RS10514773 | 1556 | LTBP1 | 4052 | 2 | 33334527 | 5.30E−03 |
| RS574819 | 1547 | | | 1 | 236844151 | 5.30E−03 |
| RS617689 | 2292 | | | 11 | 105767567 | 5.30E−03 |
| RS9324023 | 2379 | | | 14 | 27261761 | 5.30E−03 |
| RS10506053 | 1116 | | | 12 | 30061626 | 5.40E−03 |
| RS2185950 | 2211 | | | 10 | 46509931 | 5.40E−03 |
| RS2268104 | 2307 | GRIN2B | 2904 | 12 | 13714030 | 5.40E−03 |
| RS9296547 | 642 | | | 6 | 47474339 | 5.40E−03 |
| RS949637 | 1895 | | | 5 | 174447933 | 5.40E−03 |
| RS10486530 | 2035 | PTHB1 | 27241 | 7 | 33364558 | 5.50E−03 |
| RS10492132 | 2309 | GRIN2B | 2904 | 12 | 13724820 | 5.50E−03 |
| RS10492899 | 1304 | | | 16 | 50583588 | 5.50E−03 |
| RS10497332 | 1605 | STK39 | 27347 | 2 | 168548561 | 5.50E−03 |
| RS10502473 | 2503 | TAF4B | 6875 | 18 | 22175498 | 5.50E−03 |
| RS161734 | 1861 | CHD1 | 1105 | 5 | 98243608 | 5.50E−03 |
| RS2347597 | 584 | G3BP | 10146 | 5 | 151161511 | 5.50E−03 |
| RS279538 | 1779 | NDST4 | 64579 | 4 | 116105993 | 5.50E−03 |
| RS723043 | 157 | LTBP1 | 4052 | 2 | 33395291 | 5.50E−03 |
| RS9291321 | 1734 | | | 4 | 47956918 | 5.50E−03 |
| RS10502445 | 2475 | LOC390843 | 390843 | 18 | 20367446 | 5.60E−03 |
| RS10504165 | 2122 | | | 8 | 55476487 | 5.60E−03 |
| RS1149732 | 2221 | | | 10 | 79656358 | 5.60E−03 |
| RS1456196 | 293 | | | 3 | 119137243 | 5.60E−03 |
| RS1785738 | 2502 | | | 18 | 21681642 | 5.60E−03 |
| RS1805082 | 1370 | NPC1 | 4864 | 18 | 19374442 | 5.60E−03 |
| RS2031393 | 621 | | | 6 | 23796368 | 5.60E−03 |
| RS2066387 | 2194 | | | 9 | 120178850 | 5.60E−03 |
| RS2764536 | 28 | | | 1 | 69819828 | 5.60E−03 |
| RS3884537 | 2241 | | | 11 | 15020214 | 5.60E−03 |
| RS9315542 | 2349 | | | 13 | 37529471 | 5.60E−03 |
| RS965017 | 1897 | | | 5 | 174509108 | 5.60E−03 |
| RS10498721 | 1928 | C6orf32 | 9750 | 6 | 24953309 | 5.70E−03 |
| RS10502463 | 2484 | | | 18 | 20815751 | 5.70E−03 |
| RS10503513 | 2087 | | | 8 | 14598632 | 5.70E−03 |
| RS3104997 | 2143 | | | 8 | 96630910 | 5.70E−03 |
| RS6987277 | 766 | | | 8 | 8977241 | 5.70E−03 |
| RS9283566 | 1680 | | | 3 | 119162948 | 5.70E−03 |
| RS1374663 | 1869 | | | 5 | 98552774 | 5.80E−03 |
| RS1401154 | 2115 | | | 8 | 37145702 | 5.80E−03 |
| RS1549920 | 583 | | | 5 | 151121037 | 5.80E−03 |
| RS2102516 | 2088 | | | 8 | 14623080 | 5.80E−03 |
| RS3848309 | 1309 | | | 16 | 50690687 | 5.80E−03 |
| RS10491511 | 917 | | | 9 | 103219769 | 5.90E−03 |
| RS352210 | 2105 | FZD3 | 7976 | 8 | 28438339 | 5.90E−03 |
| RS567992 | 2293 | | | 11 | 105767607 | 5.90E−03 |
| RS716077 | 2179 | DDEF1 | 50807 | 8 | 131194895 | 5.90E−03 |
| RS795446 | 1641 | GADL1 | 339896 | 3 | 30776092 | 5.90E−03 |
| RS10483454 | 2394 | | | 14 | 35046027 | 6.00E−03 |
| RS10492135 | 1114 | GRIN2B | 2904 | 12 | 13777535 | 6.00E−03 |
| RS10516605 | 1772 | NDST4 | 64579 | 4 | 116016924 | 6.00E−03 |
| RS1877591 | 2225 | | | 10 | 79784171 | 6.00E−03 |
| RS2216031 | 2032 | PTHB1 | 27241 | 7 | 33312005 | 6.00E−03 |
| RS2264044 | 2089 | | | 8 | 14623176 | 6.00E−03 |
| RS2282653 | 2242 | CALCB | 797 | 11 | 15055294 | 6.00E−03 |
| RS2461055 | 851 | | | 8 | 80832082 | 6.00E−03 |
| RS10484608 | 1973 | FBXL4 | 26235 | 6 | 99442369 | 6.10E−03 |
| RS10490995 | 2224 | | | 10 | 79780912 | 6.10E−03 |
| RS1493868 | 2453 | | | 16 | 17822090 | 6.10E−03 |
| RS2055420 | 1706 | FGF12 | 2257 | 3 | 193724133 | 6.10E−03 |
| RS2075933 | 1469 | | | 1 | 34693662 | 6.10E−03 |
| RS2123769 | 1557 | LTBP1 | 4052 | 2 | 33378911 | 6.10E−03 |
| RS2163326 | 1664 | MITF | 4286 | 3 | 69959373 | 6.10E−03 |
| RS2284410 | 2312 | GRIN2B | 2904 | 12 | 13751078 | 6.10E−03 |
| RS10483455 | 2395 | LOC122592 | 122592 | 14 | 35053977 | 6.20E−03 |
| RS10492385 | 2315 | | | 12 | 29248257 | 6.20E−03 |
| RS4574886 | 2161 | COL14A1 | 7373 | 8 | 121444326 | 6.20E−03 |
| RS751716 | 2222 | | | 10 | 79720255 | 6.20E−03 |
| RS8032707 | 2444 | LOC390576 | 390576 | 15 | 35572205 | 6.20E−03 |
| RS28181 | 1814 | SEMA5A | 9037 | 5 | 9297526 | 6.30E−03 |
| RS10514762 | 1681 | | | 3 | 119164163 | 6.40E−03 |
| RS1528776 | 1536 | | | 1 | 235218861 | 6.40E−03 |
| RS787433 | 1590 | | | 2 | 145580328 | 6.40E−03 |
| RS9302534 | 2456 | | | 16 | 17956211 | 6.40E−03 |
| RS10500395 | 2457 | | | 16 | 17976966 | 6.50E−03 |
| RS174489 | 1619 | CNTN6 | 27255 | 3 | 1308797 | 6.50E−03 |
| RS3853364 | 1477 | PRNPIP | 79033 | 1 | 44544072 | 6.50E−03 |
| RS1014500 | 2289 | | | 11 | 93574371 | 6.60E−03 |
| RS10496974 | 1591 | | | 2 | 145585112 | 6.60E−03 |
| RS723042 | 1558 | LTBP1 | 4052 | 2 | 33395206 | 6.60E−03 |
| RS9285957 | 1867 | | | 5 | 98528565 | 6.60E−03 |
| RS1592326 | 2212 | LOC643650 | 643650 | 10 | 46542721 | 6.70E−03 |
| RS2662258 | 1859 | RGMB | 285704 | 5 | 98153430 | 6.70E−03 |
| RS10484177 | 2410 | | | 14 | 43966684 | 6.80E−03 |
| RS10496972 | 1587 | | | 2 | 145540029 | 6.80E−03 |
| RS1337647 | 2344 | | | 13 | 37440845 | 6.80E−03 |
| RS161723 | 1478 | PRNPIP | 79033 | 1 | 44555954 | 6.80E−03 |
| RS1073601 | 1870 | | | 5 | 98594496 | 6.90E−03 |
| RS1426935 | 456 | | | 4 | 175767040 | 6.90E−03 |
| RS725937 | 582 | SPARC | 6678 | 5 | 151036904 | 6.90E−03 |
| RS10496895 | 1586 | LRP1B | 53353 | 2 | 142242169 | 7.10E−03 |
| RS1816607 | 1579 | LRP1B | 53353 | 2 | 142194712 | 7.10E−03 |
| RS470732 | 1166 | | | 12 | 128049248 | 7.10E−03 |
| RS896331 | 2254 | | | 11 | 45371611 | 7.10E−03 |
| RS4112759 | 944 | | | 9 | 119274090 | 7.20E−03 |
| RS10491853 | 2193 | | | 9 | 119437440 | 7.30E−03 |
| RS9291322 | 1735 | | | 4 | 47958799 | 7.30E−03 |
| RS10483311 | 2374 | | | 14 | 25665022 | 7.40E−03 |
| RS240943 | 2109 | EXTL3 | 2137 | 8 | 28620759 | 7.40E−03 |
| RS2474265 | 1974 | LOC442238 | 442238 | 6 | 100640983 | 7.40E−03 |
| RS533706 | 1943 | LOC653802 | 653802 | 6 | 42420353 | 7.40E−03 |
| RS10499770 | 2047 | LOC653435 | 653435 | 7 | 63208951 | 7.50E−03 |
| RS10503168 | 2073 | LOC644668 | 644668 | 8 | 1804693 | 7.50E−03 |
| RS1945613 | 2243 | | | 11 | 15057846 | 7.50E−03 |
| RS2200455 | 1160 | | | 12 | 127358570 | 7.50E−03 |
| RS4128928 | 1678 | | | 3 | 119083686 | 7.50E−03 |
| RS4131462 | 1972 | | | 6 | 99364568 | 7.50E−03 |
| RS4510935 | 945 | | | 9 | 119325172 | 7.50E−03 |
| RS10502069 | 2295 | | | 11 | 105821821 | 7.60E−03 |
| RS9323099 | 2411 | | | 14 | 44019800 | 7.70E−03 |
| RS2614074 | 813 | | | 8 | 28222739 | 7.80E−03 |
| RS1436322 | 2320 | | | 12 | 29446072 | 7.90E−03 |
| RS1948697 | 1682 | LOC389142 | 389142 | 3 | 119243756 | 7.90E−03 |
| RS1003194 | 2244 | | | 11 | 15082661 | 8.10E−03 |
| RS2170367 | 1970 | | | 6 | 99201267 | 8.10E−03 |
| RS10492136 | 2313 | GRIN2B | 2904 | 12 | 13803044 | 8.20E−03 |
| RS10511369 | 1677 | | | 3 | 118824534 | 8.20E−03 |
| RS2396817 | 636 | | | 6 | 47255521 | 8.20E−03 |
| RS10496892 | 1581 | LRP1B | 53353 | 2 | 142195142 | 8.30E−03 |
| RS10499023 | 1971 | | | 6 | 99333450 | 8.30E−03 |
| RS10483390 | 2391 | | | 14 | 31411927 | 8.40E−03 |
| RS10503830 | 2106 | FZD3 | 7976 | 8 | 28448462 | 8.60E−03 |
| RS6760896 | 1618 | MGC42174 | 129563 | 2 | 232881167 | 8.60E−03 |
| RS1847340 | 1707 | FGF12 | 2257 | 3 | 193762780 | 8.70E−03 |
| RS331934 | 1860 | | | 5 | 98167620 | 8.70E−03 |
| RS9322878 | 2390 | | | 14 | 31411657 | 8.70E−03 |
| RS6985068 | 2081 | MSRA | 4482 | 8 | 10147230 | 8.80E−03 |
| RS10496891 | 1580 | LRP1B | 53353 | 2 | 142195006 | 9.00E−03 |
| RS10520290 | 460 | GLRA3 | 8001 | 4 | 175868392 | 9.00E−03 |
| RS329205 | 2190 | | | 9 | 8698415 | 9.00E−03 |
| RS4129498 | 2494 | | | 18 | 21255712 | 9.00E−03 |
| RS10484332 | 1922 | | | 6 | 14448309 | 9.10E−03 |
| RS10518956 | 2445 | LOC390576 | 390576 | 15 | 35596072 | 9.10E−03 |
| RS1392265 | 1683 | LOC389142 | 389142 | 3 | 119283235 | 9.10E−03 |
| RS10489168 | 1476 | PRNPIP | 79033 | 1 | 44500588 | 9.60E−03 |
| RS1397853 | 2551 | PTPRT | 11122 | 20 | 40898556 | 9.60E−03 |
| RS1524622 | 2045 | | | 7 | 62473121 | 9.60E−03 |
| RS4840117 | 1976 | | | 6 | 100671550 | 9.70E−03 |
| RS527828 | 2291 | | | 11 | 105756688 | 9.80E−03 |
| RS9295626 | 1923 | KIAA0319 | 9856 | 6 | 24695318 | 9.80E−03 |
| RS10495786 | 1559 | LTBP1 | 4052 | 2 | 33412933 | 9.90E−03 |
| RS2328846 | 1924 | KIAA0319 | 9856 | 6 | 24753174 | 1.01E−02 |
| RS3213942 | 1604 | STK39 | 27347 | 2 | 168529715 | 1.02E−02 |
| RS966905 | 2251 | | | 11 | 45061617 | 1.02E−02 |
| RS1915832 | 2046 | LOC643595 | 643595 | 7 | 57008366 | 1.03E−02 |
| RS10495785 | 158 | LTBP1 | 4052 | 2 | 33414601 | 1.08E−02 |
| RS6543706 | 1560 | LTBP1 | 4052 | 2 | 33413214 | 1.08E−02 |
| RS871151 | 75 | | | 1 | 100896325 | 1.08E−02 |
| RS9989478 | 2468 | GAS7 | 8522 | 17 | 9966550 | 1.10E−02 |
| RS6904345 | 1925 | THEM2 | 55856 | 6 | 24805403 | 1.10E−02 |
| RS10503406 | 2080 | MSRA | 4482 | 8 | 10146382 | 1.12E−02 |
| RS2754777 | 1926 | | | 6 | 24898441 | 1.12E−02 |
| RS4128139 | 2446 | | | 15 | 35710549 | 1.13E−02 |
| RS344924 | 15 | | | 1 | 67878041 | 1.15E−02 |
| RS623892 | 2049 | | | 7 | 63382694 | 1.15E−02 |
| RS9297299 | 2147 | | | 8 | 102085512 | 1.15E−02 |
| RS10495787 | 1561 | LTBP1 | 4052 | 2 | 33453813 | 1.16E−02 |
| RS687547 | 2048 | | | 7 | 63382364 | 1.16E−02 |
| RS10493058 | 1474 | | | 1 | 34761541 | 1.17E−02 |
| RS2227019 | 2110 | | | 8 | 28671025 | 1.18E−02 |
| RS1500251 | 1871 | | | 5 | 98621353 | 1.22E−02 |
| RS632301 | 1380 | | | 18 | 22616756 | 1.22E−02 |
| RS1429220 | 125 | | | 2 | 5848492 | 1.23E−02 |
| RS10520288 | 455 | | | 4 | 175746768 | 1.24E−02 |
| RS1354151 | 1676 | | | 3 | 118818111 | 1.24E−02 |
| RS10491090 | 2469 | GAS7 | 8522 | 17 | 9988337 | 1.25E−02 |
| RS10497331 | 1603 | STK39 | 27347 | 2 | 168527326 | 1.30E−02 |
| RS10502470 | 1378 | KCTD1 | 284252 | 18 | 22452475 | 1.34E−02 |
| RS2077811 | 1379 | | | 18 | 22558197 | 1.41E−02 |
| RS7813443 | 2146 | | | 8 | 102074947 | 1.42E−02 |
| RS10497330 | 1602 | | | 2 | 168508565 | 1.53E−02 |
| RS7030902 | 2191 | | | 9 | 87024911 | 1.61E−02 |
| RS1514897 | 2342 | | | 12 | 127330028 | 2.29E−02 |
| RS7213983 | 2467 | GLP2R | 9340 | 17 | 9732840 | 3.02E−02 |
| RS10521160 | 2465 | USP43 | 124739 | 17 | 9512325 | 3.23E−02 |
| RS1402656 | 2466 | GLP2R | 9340 | 17 | 9681965 | 3.25E−02 |
| RS10501796 | 2275 | FAT3 | 120114 | 11 | 92092804 | <0.0001 |
| RS10501797 | 2276 | FAT3 | 120114 | 11 | 92167618 | <0.0001 |
| RS10507768 | 2359 | | | 13 | 68865849 | <0.0001 |
| RS10517836 | 1747 | | | 4 | 63541480 | <0.0001 |
| RS1062225 | 984 | MAPK8 | 5599 | 10 | 49313232 | <0.0001 |
| RS1792369 | 1090 | FAT3 | 120114 | 11 | 92092081 | <0.0001 |
| RS1867584 | 985 | | | 10 | 49321355 | <0.0001 |
| RS2889611 | 2213 | | | 10 | 49321754 | <0.0001 |
| RS3912653 | 1091 | FAT3 | 120114 | 11 | 92135172 | <0.0001 |
| RS7939598 | 2277 | FAT3 | 120114 | 11 | 92212152 | <0.0001 |
| RS949627 | 2360 | | | 13 | 68893818 | <0.0001 |

[0180] TABLE 8
Genes associated with HDL based on t-test,
F-test and HPM results.

| GENE | Gene_ID | Chromosome |
|---|---|---|
| C6orf103 | 79747 | 6 |
| NPAS3 | 64067 | 14 |
| MAGI2 | 9863 | 7 |
| ANGPT1 | 284 | 8 |
| RRM2B | 50484 | 8 |
| TAF7 | 6879 | 5 |
| MGC42174 | 129563 | 2 |
| FLJ33708 | 285780 | 6 |
| LY86 | 9450 | 6 |
| NTNG1 | 22854 | 1 |
| LTBP1 | 4052 | 2 |
| MBP | 4155 | 18 |
| MSR1 | 4481 | 8 |
| SERPINA5 | 5104 | 14 |
| THRB | 7068 | 3 |
| GALC | 2581 | 14 |
| ARL15 | 54622 | 5 |
| GABRG2 | 2566 | 5 |
| TMEM16C | 63982 | 11 |
| UNC13C | 440279 | 15 |
| LOC644954 | 644954 | 10 |
| HNRPD | 3184 | 4 |
| LOC391672 | 391672 | 4 |
| CNGB3 | 54714 | 8 |
| SGCG | 6445 | 13 |
| 13CDNA73 | 10129 | 13 |
| BICC1 | 80114 | 10 |
| ZFPM2 | 23414 | 8 |
| CRIM1 | 51232 | 2 |
| TULP4 | 56995 | 6 |
| EFHA1 | 221154 | 13 |
| GPR110 | 266977 | 6 |
| LUZP2 | 338645 | 11 |
| SYNE2 | 23224 | 14 |
| LOC646176 | 646176 | 11 |
| PYGL | 5836 | 14 |
| FRAS1 | 80144 | 4 |
| CNNM2 | 54805 | 10 |
| HYPB | 29072 | 3 |
| DMD | 1756 | X |
| SVEP1 | 79987 | 9 |
| MAPK8 | 5599 | 10 |
| ABCD3 | 5825 | 1 |
| NTN1 | 9423 | 17 |
| SPATA4 | 132851 | 4 |
| FLJ32942 | 121355 | 12 |
| SNAP25 | 6616 | 20 |
| NAALADL2 | 254827 | 3 |
| CAMTA1 | 23261 | 1 |
| NT5C2 | 22978 | 10 |
| RORA | 6095 | 15 |
| XRCC2 | 7516 | 7 |
| mimitin | 91942 | 5 |
| DOK6 | 220164 | 18 |
| LOC400954 | 400954 | 2 |
| FRMPD2 | 143162 | 10 |
| NPC1 | 4864 | 18 |
| PRKG1 | 5592 | 10 |
| LOC646790 | 646790 | 2 |
| FARS2 | 10667 | 6 |
| GPC5 | 2262 | 13 |
| WRN | 7486 | 8 |
| ZNF429 | 353088 | 19 |
| CACNA1E | 777 | 1 |
| GARNL1 | 253959 | 14 |
| APLP2 | 334 | 11 |
| ASTN2 | 23245 | 9 |
| VGCNL1 | 259232 | 13 |
| TRPA1 | 8989 | 8 |
| DLG2 | 1740 | 11 |
| CARD8 | 22900 | 19 |
| HECW2 | 57520 | 2 |
| LAMA3 | 3909 | 18 |
| TANC2 | 26115 | 17 |
| TAF3 | 83860 | 10 |
| KIAA1843 | 84540 | 2 |
| PTPN12 | 5782 | 7 |
| UNQ6975 | 400952 | 2 |
| NCAM1 | 4684 | 11 |
| FLJ10099 | 55069 | 7 |
| CUBN | 8029 | 10 |
| C10orf130 | 387707 | 10 |
| E2F2 | 1870 | 1 |
| F3 | 2152 | 1 |
| SFRP4 | 6424 | 7 |
| KALRN | 8997 | 3 |
| LOC653748 | 653748 | 7 |
| RIT2 | 6014 | 18 |
| LOC285929 | 285929 | 7 |
| TAS2R16 | 50833 | 7 |
| ITGB5 | 3693 | 3 |
| CCDC26 | 137196 | 8 |
| FLT4 | 2324 | 5 |
| BLNK | 29760 | 10 |
| GLA | 2717 | X |
| LOC644053 | 644053 | 1 |
| PCSK1 | 5122 | 5 |
| CNTN3 | 5067 | 3 |
| LOC646444 | 646444 | 8 |
| C10orf107 | 219621 | 10 |
| LOC138046 | 138046 | 8 |
| ANK3 | 288 | 10 |
| DKFZP566M1046 | 84067 | 11 |
| ADAM12 | 8038 | 10 |
| SMYD3 | 64754 | 1 |
| C10orf112 | 340895 | 10 |
| MGC48628 | 401145 | 4 |
| UFM1 | 51569 | 13 |
| PCDH7 | 5099 | 4 |
| LRP1B | 53353 | 2 |
| CDADC1 | 81602 | 13 |
| NRG3 | 10718 | 10 |
| HNRPDL | 9987 | 4 |
| LOC645492 | 645492 | 6 |
| FMN2 | 56776 | 1 |
| FAT3 | 120114 | 11 |
| FLJ16124 | 440867 | 2 |
| KIAA1797 | 54914 | 9 |
| SLC4A4 | 8671 | 4 |
| C12orf26 | 84190 | 12 |
| AAA1 | 404744 | 7 |
| GABRB1 | 2560 | 4 |
| LOC647219 | 647219 | 1 |
| PGM5 | 5239 | 9 |
| GNAL | 2774 | 18 |
| ADAM29 | 11086 | 4 |
| MAP2K6 | 5608 | 17 |
| PSMA1 | 5682 | 11 |
| TLR4 | 7099 | 9 |
| LOC442161 | 442161 | 6 |
| SLC15A2 | 6565 | 3 |
| AMPH | 273 | 7 |
| UNC5C | 8633 | 4 |
| UBQLN1 | 29979 | 9 |
| LOC388458 | 388458 | 18 |
| CPNE3 | 8895 | 8 |
| SLC15A4 | 121260 | 12 |
| EPHB1 | 2047 | 3 |
| GPR158 | 57512 | 10 |
| GPC6 | 10082 | 13 |
| TRIM24 | 8805 | 7 |
| HLA-DQB2 | 3120 | 6 |
| KIAA1772 | 80000 | 18 |
| VRK1 | 7443 | 14 |
| PTPRT | 11122 | 20 |
| RBBP5 | 5929 | 1 |
| DKFZp761O2018 | 92293 | 12 |
| LOC388730 | 388730 | 1 |
| KCNH5 | 27133 | 14 |
| DGKB | 1607 | 7 |
| COL25A1 | 84570 | 4 |
| BIVM | 54841 | 13 |
| FBXL3 | 26224 | 13 |
| TSPAN8 | 7103 | 12 |
| TXNDC3 | 51314 | 7 |
| GRIN2B | 2904 | 12 |
| LOC283553 | 283553 | 14 |
| PLEKHA7 | 144100 | 11 |
| RAPGEF4 | 11069 | 2 |
| LPHN2 | 23266 | 1 |
| HABP2 | 3026 | 10 |
| SDK1 | 221935 | 7 |
| CNTN5 | 53942 | 11 |
| GBP2 | 2634 | 1 |
| GRIK1 | 2897 | 21 |
| ADCY2 | 108 | 5 |
| GAS7 | 8522 | 17 |
| RIPK5 | 25778 | 1 |
| FAM77D | 286183 | 8 |
| AOX2 | 344454 | 2 |
| BCL2 | 596 | 18 |
| ZBTB10 | 65986 | 8 |
| CSMD1 | 64478 | 8 |
| BACE2 | 25825 | 21 |
| PLEKHH2 | 130271 | 2 |
| EPDR1 | 54749 | 7 |
| KCTD1 | 284252 | 18 |
| LOC442117 | 442117 | 4 |
| C11orf11 | 747 | 11 |
| PAP2D | 163404 | 1 |
| MANBA | 4126 | 4 |
| CRSP8 | 9442 | 9 |
| LOC646697 | 646697 | 4 |
| LOC440261 | 440261 | 15 |
| KCNQ5 | 56479 | 6 |
| GMDS | 2762 | 6 |
| PSD3 | 23362 | 8 |
| CAST1 | 26059 | 3 |
| DLGAP2 | 9228 | 8 |
| USH2A | 7399 | 1 |
| RYR2 | 6262 | 1 |
| MCF2L2 | 23101 | 3 |
| VSNL1 | 7447 | 2 |
| LSAMP | 4045 | 3 |
| FARP1 | 10160 | 13 |
| MCTP2 | 55784 | 15 |
| SRFBP1 | 153443 | 5 |
| EPHA4 | 2043 | 2 |
| CRISP2 | 7180 | 6 |
| LOC442238 | 442238 | 6 |
| POU6F2 | 11281 | 7 |
| LOC144678 | 144678 | 12 |
| KIAA1276 | 27146 | 4 |
| GBAS | 2631 | 7 |
| PDE8B | 8622 | 5 |
| NMNAT2 | 23057 | 1 |
| FLJ34931 | 388939 | 2 |
| PTPRJ | 5795 | 11 |
| OSBPL1A | 114876 | 18 |
| FLJ25323 | 374470 | 12 |
| SCFD2 | 152579 | 4 |
| ABCA12 | 26154 | 2 |
| MAPK10 | 5602 | 4 |
| LOC645939 | 645939 | 1 |
| LOC139060 | 139060 | X |
| USP10 | 9100 | 16 |
| NFIA | 4774 | 1 |
| CLDN11 | 5010 | 3 |
| RGS9 | 8787 | 17 |
| IL6 | 3569 | 7 |
| ITSN1 | 6453 | 21 |
| GALNT14 | 79623 | 2 |
| TASP1 | 55617 | 20 |
| CLPB | 81570 | 11 |
| PTPRR | 5801 | 12 |
| USP24 | 23358 | 1 |
| FLJ39155 | 133584 | 5 |
| MALL | 7851 | 2 |
| C9orf125 | 84302 | 9 |
| PRICKLE2 | 166336 | 3 |
| DNAJC5B | 85479 | 8 |
| DTNA | 1837 | 18 |
| SDHC | 6391 | 1 |
| HSPC117 | 51493 | 22 |
| LCTL | 197021 | 15 |
| MGC9850 | 219404 | 13 |
| LOC119710 | 119710 | 11 |
| LOC645254 | 645254 | 10 |
| UST | 10090 | 6 |
| KIAA1622 | 57718 | 14 |
| MYO1B | 4430 | 2 |
| C9orf39 | 54875 | 9 |
| STAU2 | 27067 | 8 |
| ESRRG | 2104 | 1 |
| AYTL1 | 54947 | 16 |
| ATE1 | 11101 | 10 |
| COMMD10 | 51397 | 5 |
| PHACTR1 | 221692 | 6 |
| YPEL2 | 388403 | 17 |
| KIAA1706 | 80820 | 7 |
| LRRN6C | 158038 | 9 |
| GDF9 | 2661 | 5 |
| LGR5 | 8549 | 12 |
| FLJ45974 | 401337 | 7 |
| VAV3 | 10451 | 1 |
| C20orf133 | 140733 | 20 |
| LOC644802 | 644802 | 22 |
| C10orf80 | 159686 | 10 |
| MEIS2 | 4212 | 15 |
| SLC9A9 | 285195 | 3 |
| GBP1 | 2633 | 1 |
| GPR116 | 221395 | 6 |
| SLC39A12 | 221074 | 10 |
| TEC | 7006 | 4 |
| KIAA0746 | 23231 | 4 |
| FLJ26443 | 400165 | 13 |
| LOC342531 | 342531 | 17 |
| IRS1 | 3667 | 2 |
| FSTL4 | 23105 | 5 |
| ZNF533 | 151126 | 2 |
| CHST11 | 50515 | 12 |
| SLC17A3 | 10786 | 6 |
| MSRB3 | 253827 | 12 |
| DSG4 | 147409 | 18 |
| LOC441900 | 441900 | 1 |
| TMEFF2 | 23671 | 2 |
| ZNF659 | 79750 | 3 |
| RSBN1L | 222194 | 7 |
| PAPPA2 | 60676 | 1 |
| DCAMKL2 | 166614 | 4 |
| LOC645986 | 645986 | 8 |
| GRM7 | 2917 | 3 |
| LOC134541 | 134541 | 5 |
| SPIRE1 | 56907 | 18 |
| EDIL3 | 10085 | 5 |
| ACN9 | 57001 | 7 |
| PEX5L | 51555 | 3 |
| MMP2 | 4313 | 16 |
| ABCC4 | 10257 | 13 |
| NPHP1 | 4867 | 2 |
| CNTN2 | 6900 | 1 |
| GPR73L1 | 128674 | 20 |
| DDAH1 | 23576 | 1 |
| WWOX | 51741 | 16 |
| TCAB1 | 154215 | 6 |
| SYNE1 | 23345 | 6 |
| LOC647154 | 647154 | 13 |
| G3BP | 10146 | 5 |
| COL24A1 | 255631 | 1 |
| SNTG1 | 54212 | 8 |
| IL19 | 29949 | 1 |
| CDH13 | 1012 | 16 |
| FLJ34690 | 284034 | 17 |
| C9orf84 | 158401 | 9 |
| NAV3 | 89795 | 12 |
| SORBS1 | 10580 | 10 |
| SV2V | 22987 | 5 |
| PIK3C3 | 5289 | 18 |
| CNTN4 | 152330 | 3 |
| C6orf96 | 55005 | 6 |
| LOC646169 | 646169 | 11 |
| FBXO33 | 254170 | 14 |
| RGS3 | 5998 | 9 |
| PHC1 | 1911 | 12 |
| SALF | 286749 | 2 |
| GLRA1 | 2741 | 5 |
| GLRA3 | 8001 | 4 |
| LOC389644 | 389644 | 8 |
| PALLD | 23022 | 4 |
| IQCB1 | 9657 | 3 |
| FLJ22104 | 65084 | 11 |
| GRIN2A | 2903 | 16 |
| KIAA0774 | 23281 | 13 |
| DCP1B | 196513 | 12 |
| NUBPL | 80224 | 14 |
| PNLIPRP3 | 119548 | 10 |
| FAT4 | 79633 | 4 |
| LOC401898 | 401898 | 19 |
| COL11A1 | 1301 | 1 |
| GLYAT | 10249 | 11 |
| GLYATL2 | 219970 | 11 |
| GRIN3A | 116443 | 9 |
| FLJ21820 | 60526 | 2 |
| ZBTB20 | 26137 | 3 |
| PTPRD | 5789 | 9 |
| TEX2 | 55852 | 17 |
| SLC6A17 | 388662 | 1 |
| NCAM2 | 4685 | 21 |
| CDK6 | 1021 | 7 |
| ROR1 | 4919 | 1 |
| TMEM16D | 121601 | 12 |
| KBTBD9 | 114818 | 2 |
| ANXA5 | 308 | 4 |
| SPARC | 6678 | 5 |
| ZBTB2 | 57621 | 6 |
| CST9 | 128822 | 20 |
| ST3GAL6 | 10402 | 3 |
| C1orf139 | 79971 | 1 |
| NTRK2 | 4915 | 9 |
| LOC128820 | 128820 | 20 |
| ROCK1 | 6093 | 18 |
| LOC401954 | 401954 | 1 |
| ZNF85 | 7639 | 19 |
| ZNF208 | 7757 | 19 |
| OTUB2 | 78990 | 14 |
| GALNTL4 | 374378 | 11 |
| TMCC2 | 9911 | 1 |
| LOC390503 | 390503 | 14 |
| PNOC | 5368 | 8 |

[0181] TABLE 9
Genes associated with APOA1 based on t-test,
F-test and HPM results.

| GENE | Gene_ID | Chromosome |
|---|---|---|
| SERPINA5 | 5104 | 14 |
| PSD3 | 23362 | 8 |
| LOC644954 | 644954 | 10 |
| mimitin | 91942 | 5 |
| MGC42174 | 129563 | 2 |
| NPAS3 | 64067 | 14 |
| RRM2B | 50484 | 8 |
| FLJ33708 | 285780 | 6 |
| TAF7 | 6879 | 5 |
| FAT3 | 120114 | 11 |
| MAGI2 | 9863 | 7 |
| LY86 | 9450 | 6 |
| MBP | 4155 | 18 |
| BMP6 | 654 | 6 |
| GBP2 | 2634 | 1 |
| GARNL1 | 253959 | 14 |
| GABRG2 | 2566 | 5 |
| DACH2 | 117154 | X |
| MAPK8 | 5599 | 10 |
| MDS1 | 4197 | 3 |
| LOC442238 | 442238 | 6 |
| MARCH8 | 220972 | 10 |
| DKFZp761O2018 | 92293 | 12 |
| GBP1 | 2633 | 1 |
| NDST4 | 64579 | 4 |
| RAB6IP2 | 23085 | 12 |
| PTPRT | 11122 | 20 |
| TM7SF4 | 81501 | 8 |
| SLC17A3 | 10786 | 6 |
| AMPH | 273 | 7 |
| LOC128153 | 128153 | 1 |
| DLGAP2 | 9228 | 8 |
| LPHN2 | 23266 | 1 |
| C6orf103 | 79747 | 6 |
| SDK1 | 221935 | 7 |
| ANK3 | 288 | 10 |
| TPD52L1 | 7164 | 6 |
| SEMA5A | 9037 | 5 |
| ZNF521 | 25925 | 18 |
| ARHGAP22 | 58504 | 10 |
| ELOVL7 | 79993 | 5 |
| C9orf39 | 54875 | 9 |
| DEPC-1 | 221120 | 11 |
| ESRRG | 2104 | 1 |
| LTBP1 | 4052 | 2 |
| ARL15 | 54622 | 5 |
| FAM19A4 | 151647 | 3 |
| CLPTM1 | 1209 | 19 |
| CDYL | 9425 | 6 |
| MSR1 | 4481 | 8 |
| RYR2 | 6262 | 1 |
| C20orf133 | 140733 | 20 |
| LOC392222 | 392222 | 8 |
| TASP1 | 55617 | 20 |
| FLT4 | 2324 | 5 |
| GRIK4 | 2900 | 11 |
| THRB | 7068 | 3 |
| MITF | 4286 | 3 |
| C15orf41 | 84529 | 15 |
| LOC389142 | 389142 | 3 |
| NRG3 | 10718 | 10 |
| SLC15A4 | 121260 | 12 |
| LOC144678 | 144678 | 12 |
| PTHB1 | 27241 | 7 |
| TAF3 | 83860 | 10 |
| RIMS1 | 22999 | 6 |
| ACADSB | 36 | 10 |
| SLC35F1 | 222553 | 6 |
| ABCA12 | 26154 | 2 |
| HEPHL1 | 341208 | 11 |
| BAI3 | 577 | 6 |
| HUNK | 30811 | 21 |
| UST | 10090 | 6 |
| TAF4B | 6875 | 18 |
| COL14A1 | 7373 | 8 |
| CSS3 | 337876 | 5 |
| LOC653802 | 653802 | 6 |
| C9orf84 | 158401 | 9 |
| GRM1 | 2911 | 6 |
| C8orf37 | 157657 | 8 |
| ASTN | 460 | 1 |
| RGS7 | 6000 | 1 |
| FLJ36166 | 349152 | 7 |
| ANGPT1 | 284 | 8 |
| FARS2 | 10667 | 6 |
| SYNE2 | 23224 | 14 |
| SMYD3 | 64754 | 1 |
| GPC5 | 2262 | 13 |
| FAM55D | 54827 | 11 |
| LOC390843 | 390843 | 18 |
| LOC283247 | 283247 | 11 |
| ADAMTS12 | 81792 | 5 |
| FGF12 | 2257 | 3 |
| MTMR3 | 8897 | 22 |
| LUZP2 | 338645 | 11 |
| C9orf125 | 84302 | 9 |
| SYTL3 | 94120 | 6 |
| NTNG1 | 22854 | 1 |
| UNC5C | 8633 | 4 |
| KIAA0672 | 9912 | 17 |
| RORA | 6095 | 15 |
| ZFPM2 | 23414 | 8 |
| GAS7 | 8522 | 17 |
| NUBPL | 80224 | 14 |
| SEC11L2 | 157708 | 8 |
| PTPRJ | 5795 | 11 |
| UNC13C | 440279 | 15 |
| C21orf41 | 54073 | 21 |
| KIAA1191 | 57179 | 5 |
| GPR115 | 221393 | 6 |
| UNQ6975 | 400952 | 2 |
| CGI-09 | 51602 | 20 |
| DMD | 1756 | X |
| TEC | 7006 | 4 |
| HSPC117 | 51493 | 22 |
| TCTEX1D1 | 200132 | 1 |
| FBN2 | 2201 | 5 |
| CSMD1 | 64478 | 8 |
| CARD8 | 22900 | 19 |
| PDE4D | 5144 | 5 |
| SEMA3D | 223117 | 7 |
| NAALADL2 | 254827 | 3 |
| MID1 | 4281 | X |
| C8ORFK36 | 340359 | 8 |
| RB1CC1 | 9821 | 8 |
| IFRD1 | 3475 | 7 |
| TPR | 7175 | 1 |
| ERCC8 | 1161 | 5 |
| XRCC2 | 7516 | 7 |
| BCAS1 | 8537 | 20 |
| MSRA | 4482 | 8 |
| DGKB | 1607 | 7 |
| ATG5 | 9474 | 6 |
| C7orf25 | 79020 | 7 |
| TMEM108 | 66000 | 3 |
| PLXDC2 | 84898 | 10 |
| HECW2 | 57520 | 2 |
| MSH3 | 4437 | 5 |
| KIAA1239 | 57495 | 4 |
| GRIN2B | 2904 | 12 |
| TXNDC5 | 81567 | 6 |
| LOC138046 | 138046 | 8 |
| C1orf139 | 79971 | 1 |
| C10orf130 | 387707 | 10 |
| DNAJA2 | 10294 | 16 |
| KCTD1 | 284252 | 18 |
| LOC643811 | 643811 | 15 |
| FLJ10379 | 55133 | 2 |
| PIGN | 23556 | 18 |
| CCDC50 | 152137 | 3 |
| PNOC | 5368 | 8 |
| FZD3 | 7976 | 8 |
| ITSN1 | 6453 | 21 |
| POGZ | 23126 | 1 |
| XKR4 | 114786 | 8 |
| ATE1 | 11101 | 10 |
| RAD51L1 | 5890 | 14 |
| SH3BGRL2 | 83699 | 6 |
| RGMB | 285704 | 5 |
| KIAA1414 | 54497 | 2 |
| NPC1 | 4864 | 18 |
| ABTB2 | 25841 | 11 |
| ADCK1 | 57143 | 14 |
| C10orf115 | 387642 | 10 |
| CALN1 | 83698 | 7 |
| FBXO16 | 157574 | 8 |
| PPFIA2 | 8499 | 12 |
| STK39 | 27347 | 2 |
| FAM19A1 | 407738 | 3 |
| FBXO42 | 54455 | 1 |
| CDC2 | 983 | 10 |
| BLNK | 29760 | 10 |
| CNTN6 | 27255 | 3 |
| PHC1 | 1911 | 12 |
| ARHGAP18 | 93663 | 6 |
| PRG4 | 10216 | 1 |
| LOC401898 | 401898 | 19 |
| HYPB | 29072 | 3 |
| FRMPD2 | 143162 | 10 |
| CNNM2 | 54805 | 10 |
| C1orf27 | 54953 | 1 |
| FLJ10159 | 55084 | 6 |
| SBF2 | 81846 | 11 |
| SRGAP3 | 9901 | 3 |
| SLC8A1 | 6546 | 2 |
| TGFBR2 | 7048 | 3 |
| LAMA3 | 3909 | 18 |
| MALL | 7851 | 2 |
| UBR2 | 23304 | 6 |
| ZBTB20 | 26137 | 3 |
| REG4 | 83998 | 1 |
| ITIH5 | 80760 | 10 |
| ADAMTS19 | 171019 | 5 |
| KIAA1468 | 57614 | 18 |
| LRP1B | 53353 | 2 |
| PGBD3P3 | 267007 | 12 |
| LOC646210 | 646210 | 5 |
| RUTBC2 | 129049 | 22 |
| WWOX | 51741 | 16 |
| SP110 | 3431 | 2 |
| OR4C4P | 79550 | 11 |
| LOC442195 | 442195 | 6 |
| LARGE | 9215 | 22 |
| SLC25A24 | 29957 | 1 |
| CACNA2D3 | 55799 | 3 |
| SGIP1 | 84251 | 1 |
| GALC | 2581 | 14 |
| LOC387755 | 387755 | 11 |
| IQCB1 | 9657 | 3 |
| FMN2 | 56776 | 1 |
| AP3B1 | 8546 | 5 |
| EIF3S10 | 8661 | 10 |
| NPHP1 | 4867 | 2 |
| ANKRD28 | 23243 | 3 |
| CAPS2 | 84698 | 12 |
| LOC653227 | 653227 | 15 |
| ANKS1 | 23294 | 6 |
| EMR3 | 84658 | 19 |
| DNAJC5B | 85479 | 8 |
| PAPPA2 | 60676 | 1 |
| CDH13 | 1012 | 16 |
| FRAS1 | 80144 | 4 |
| CABIN1 | 23523 | 22 |
| RSRC1 | 51319 | 3 |
| CLDN11 | 5010 | 3 |
| GUCA1C | 9626 | 3 |
| SRI | 6717 | 7 |
| TSPAN8 | 7103 | 12 |
| LOC646385 | 646385 | 7 |
| RYR3 | 6263 | 15 |
| LOC653748 | 653748 | 7 |
| C18orf1 | 753 | 18 |
| NMNAT3 | 349565 | 3 |
| LOC645960 | 645960 | 8 |
| DYNC2LI1 | 51626 | 2 |
| C10orf72 | 196740 | 10 |
| C7orf10 | 79783 | 7 |
| RAC1P1 | 387612 | 18 |
| TYRL | 7300 | 11 |
| LOC646176 | 646176 | 11 |
| CSMD2 | 114784 | 1 |
| CNTNAP5 | 129684 | 2 |
| NTRK2 | 4915 | 9 |
| ZBTB11 | 27107 | 3 |
| PAX9 | 5083 | 14 |
| GPATC2 | 55105 | 1 |
| HNRPD | 3184 | 4 |
| CCBE1 | 147372 | 18 |
| CNTN4 | 152330 | 3 |
| CTNND2 | 1501 | 5 |
| DDEF1 | 50807 | 8 |
| CPXM2 | 119587 | 10 |
| UTRN | 7402 | 6 |
| PRNPIP | 79033 | 1 |
| DRCTNNB1A | 84668 | 7 |
| ALK | 238 | 2 |
| PFKP | 5214 | 10 |
| SLC44A5 | 204962 | 1 |
| MPPED2 | 744 | 11 |
| DNAH8 | 1769 | 6 |
| ZFAND3 | 60685 | 6 |
| SPIRE1 | 56907 | 18 |
| LOC646184 | 646184 | 13 |
| SEC15L2 | 23233 | 2 |
| LOC647219 | 647219 | 1 |
| C14orf101 | 54916 | 14 |
| ANKRD50 | 57182 | 4 |
| GLRA3 | 8001 | 4 |
| TMEM16D | 121601 | 12 |
| LYST | 1130 | 1 |
| LOC390576 | 390576 | 15 |
| GBAS | 2631 | 7 |
| PEX5L | 51555 | 3 |
| C10orf110 | 55853 | 10 |
| LOC223075 | 223075 | 7 |
| EPHA6 | 285220 | 3 |
| RARB | 5915 | 3 |
| LRRN1 | 57633 | 3 |
| DGAT2L4 | 158835 | X |
| MUC19 | 283463 | 12 |
| ITGA1 | 3672 | 5 |
| GADL1 | 339896 | 3 |
| ADCY9 | 115 | 16 |
| EXOC3 | 11336 | 5 |
| UBE2E2 | 7325 | 3 |
| EFHA1 | 221154 | 13 |
| CRIM1 | 51232 | 2 |
| PRDM11 | 56981 | 11 |
| LOC653584 | 653584 | 3 |
| FLJ22104 | 65084 | 11 |
| TUBB1 | 81027 | 20 |
| SGNE1 | 6447 | 15 |
| MBD2 | 8932 | 18 |
| PALLD | 23022 | 4 |
| FSTL4 | 23105 | 5 |
| GLRA1 | 2741 | 5 |
| LOC653480 | 653480 | 10 |
| NCAM2 | 4685 | 21 |
| TMEFF2 | 23671 | 2 |
| TRAPPC6B | 122553 | 14 |
| HIVEP3 | 59269 | 1 |
| MORC1 | 27136 | 3 |
| NTN1 | 9423 | 17 |
| PTX1 | 51290 | 12 |
| CADPS | 8618 | 3 |
| C6orf32 | 9750 | 6 |
| SERBP1 | 26135 | 1 |
| BRMS1L | 84312 | 14 |
| SH3GL2 | 6456 | 9 |
| C1orf164 | 55182 | 1 |
| LOC644668 | 644668 | 8 |
| CHD1 | 1105 | 5 |
| G3BP | 10146 | 5 |
| FLJ30058 | 158763 | X |
| CALCB | 797 | 11 |
| FBXL4 | 26235 | 6 |
| LOC122592 | 122592 | 14 |
| LOC643650 | 643650 | 10 |
| SPARC | 6678 | 5 |
| EXTL3 | 2317 | 8 |
| LOC653435 | 653435 | 7 |
| KIAA0319 | 9856 | 6 |
| LOC643595 | 643595 | 7 |
| THEM2 | 55856 | 6 |
| GLP2R | 9340 | 17 |
| USP43 | 124739 | 17 |

[0182] TABLE 10
A linear regression model predicting serum HDL-Cholesterol concentration.

| | Sequence | | | | Risk | | Vari- | Un | Std. | | | |
|---|---|---|---|---|---|---|---|---|---|---|---|---|
| dbSNP rs ID | ID | Gene and Gene ID | Chromosome | Position | Allele | Frequency | ants | stand. b | Error | Stand. b | t value | P value |
| RS10485111 | 681 | | 6 | 11629981 | T | 13.36 | C/T | 0.086 | 0.025 | 0.134 | 3.420 | 0.001 |
| RS10497776 | 228 | | 2 | 196678391 | G | 1.31 | A/G | 0.328 | 0.084 | 0.151 | 3.889 | <0.001 |
| RS10506790 | 1141 | | 12 | 7784138 | A | 9.27 | A/G | 0.116 | 0.03 | 0.154 | 3.938 | <0.001 |
| RS1452528 | 670 | | 6 | 79155079 | A | 49.73 | A/G | 0.071 | 0.017 | 0.165 | 4.191 | <0.001 |
| RS1480145 | 796 | | 8 | 16181494 | G | 1.83 | C/G | 0.240 | 0.056 | 0.169 | 4.320 | <0.001 |
| RS1490125 | 651 | | 6 | 66451580 | T | 13.72 | G/T | −0.151 | 0.027 | −0.220 | −5.716 | <0.001 |
| RS1851006 | 1278 | UNC13C 440279 | 15 | 52691684 | C | 46.3 | C/T | −0.068 | 0.017 | −0.151 | −3.921 | <0.001 |
| RS1935229 | 1 | CAMTA1 23261 | 1 | 7683588 | C | 6.84 | C/T | 0.148 | 0.035 | 0.165 | 4.276 | <0.001 |
| RS198278 | 711 | | 7 | 24214718 | A | 47.97 | A/G | −0.083 | 0.017 | −0.185 | −4.803 | <0.001 |
| RS2029259 | 484 | | 4 | 188284137 | C | 11.45 | A/C | 0.094 | 0.026 | 0.142 | 3.639 | <0.001 |
| RS2195989 | 872 | ANGPT1 284 | 8 | 108555088 | C | 13.8 | C/T | 0.089 | 0.023 | 0.153 | 3.842 | <0.001 |
| RS2333821 | 170 | LOC646790 646790 | 2 | 44230030 | T | 26.44 | C/T | 0.085 | 0.019 | 0.174 | 4.556 | <0.001 |
| RS33375 | 598 | | 5 | 170998718 | A | 14.53 | A/G | 0.085 | 0.025 | 0.133 | 3.400 | 0.001 |
| RS4770403 | 1173 | SGCG 6445 | 13 | 22653127 | A | 11.75 | A/G | 0.113 | 0.028 | 0.159 | 4.066 | <0.001 |
| RS723043 | 157 | LTBP1 4052 | 2 | 33395291 | T | 43.22 | G/T | 0.072 | 0.018 | 0.150 | 3.886 | <0.001 |
| RS745708 | 976 | FRMPD2 143162 | 10 | 49115681 | G | 18.04 | A/G | 0.097 | 0.023 | 0.165 | 4.283 | <0.001 |
| RS7794555 | 754 | LOC653748 653748 | 7 | 153675164 | T | 6.84 | C/T | 0.194 | 0.034 | 0.219 | 5.662 | <0.001 |
| RS896990 | 251 | MGC42174 129563 | 2 | 232597100 | A | 8.9 | A/C | 0.139 | 0.028 | 0.192 | 4.973 | <0.001 |

dbSNP_rs_ID: SNP identification number in NCBI dbSNP database build 125
Gene_locus: Gene positioned in the physical position pointed by the SNP according to NCBI Human Genome Build 36

[0183] TABLE 11
A linear regression model predicting serum ApoA1 concentration.

| | Sequence | | | | Risk | | Vari- | Un | Std. | | | |
|---|---|---|---|---|---|---|---|---|---|---|---|---|
| dbSNP rs ID | ID | Gene and Gene ID | Chromosome | Position | Allele | Frequency | ants | stand. b | Error | Stand. b | t value | P value |
| RS1016579 | 881 | | 8 | 129269143 | A | 6.41 | A/G | 0.153 | 0.031 | 0.195 | 4.946 | <0.001 |
| RS10498673 | 1912 | BMP6 654 | 6 | 7770256 | T | 14.02 | C/T | 0.146 | 0.020 | 0.288 | 7.437 | <0.001 |
| RS10521381 | 2582 | | X | 85978186 | G | 29.44 | G/T | 0.053 | 0.012 | 0.177 | 4.509 | <0.001 |
| RS1298362 | 1136 | | 12 | 74493708 | A | 47.57 | A/G | −0.057 | 0.014 | −0.158 | −3.983 | <0.001 |
| RS1867584 | 985 | | 10 | 49321355 | T | 41.74 | C/T | 0.053 | 0.014 | 0.146 | 3.687 | <0.001 |
| RS2111826 | 309 | CLDN11 5010 | 3 | 171623540 | A | 9.21 | A/G | −0.102 | 0.027 | −0.147 | −3.809 | <0.001 |
| RS2353296 | 1733 | | 6 | 47956320 | A | 7.08 | A/C | 0.106 | 0.028 | 0.148 | 3.742 | <0.001 |
| RS25937 | 1815 | CTNND2 1501 | 5 | 11556189 | A | 9.55 | A/G | 0.100 | 0.027 | 0.145 | 3.693 | <0.001 |
| RS352427 | 816 | | 8 | 28571996 | G | 3.29 | A/G | 0.152 | 0.038 | 0.158 | 4.064 | <0.001 |
| RS3912653 | 1091 | FAT3 120114 | 11 | 92135172 | A | 39.68 | A/G | −0.056 | 0.014 | −0.157 | −4.027 | <0.001 |
| RS6919514 | 688 | UST 10090 | 6 | 149151922 | G | 9.19 | G/T | 0.108 | 0.026 | 0.164 | 4.205 | <0.001 |
| RS6954679 | 728 | | 7 | 63134099 | G | 8.03 | A/G | 0.127 | 0.024 | 0.208 | 5.272 | <0.001 |
| RS877345 | 958 | TAF3 83860 | 10 | 8093782 | C | 9.5 | A/C | 0.083 | 0.023 | 0.139 | 3.566 | <0.001 |
| RS878016 | 757 | DLGAP2 9228 | 8 | 1585693 | C | 27.11 | A/C | 0.060 | 0.014 | 0.167 | 4.284 | <0.001 |
| RS901682 | 2208 | MARCH8 220972 | 10 | 45285867 | A | 5.67 | A/G | −0.217 | 0.030 | −0.289 | −7.300 | <0.001 |
| RS9323682 | 2422 | | 14 | 79536316 | A | 7.65 | A/G | 0.083 | 0.025 | 0.131 | 3.358 | 0.001 |

dbSNP_rs_ID: SNP identification number in NCBI dbSNP database build 125
Gene_locus: Gene positioned in the physical position pointed by the SNP according to NCBI Human Genome Build 36
Sequence_ID: Sequence identification number
Risk_allele: The allele that is considered as independet variable in the regression model
Frequency: Frequency of the risk-allele in the data
Variants: Variant alleles present in the SNP
Un stand. b: Unstandardized coefficient in the regression model
Std. Error: Standard error of the coefficient
Stand. b: Standardized coefficient
t value: t value for unstandardized coefficient b
P value: Two tailed significance level of t
Coding of SNPs: 0, 1, 2 where code 2 denotes homozygocity of the minor allele code 1 heterozygocity and code 0 homozygocity of non-minor allele.

### REFERENCES

[0184] Alberti, K. G. and P. Z. Zimmet, Definition, diagnosis and classification of diabetes mellitus and its complications. Part 1: diagnosis and classification of diabetes melfitus. Provisional report of a WHO consultation. Diabet Med, 1998. 15(7): p. 539-53.
[0185] Alberti, K G., Impaired glucose tolerance: what are the clinical implications? Diabetes Res Clin Pract, 1998. 40 Suppl: p. S3-8.
[0186] American Heart Association. Heart Disease and Stroke Statistics—2004 Update. http://www.americanheart.org/downloadable/heart/1079736729696HDSStats2O04UpdateR EV3-19-04.pdf (Accessed 14.07.04).
[0187] Attie, A-D., J. P. Kastelein, and M. R. Hayden, Pivotal role of ABCA1 in reverse cholesterol transport influencing HDL levels and susceptibility to atherosclerosis. J Lipid Res, 2001. 42(11): p. 1717-26.
[0188] Barter, P. J., et al., Antiinflammatory properties of HDL. Circ Res, 2004. 95(8): p. 764-72.
[0189] Bierer B, Coligan J E, Margulies D H, Shevach E M, Strober W. 2002. Current Protocols in Immunology. NY:John Wiley & Sons.
[0190] Brousseau M E, Goldkamp A L, Collins D, Demissie S, Connolly A C, Cupples L A, Ordovas J M, Bloomfield H E, Robins S J, Schaefer E J. Polymorphisms in the gene encoding lipoprotein lipase in men with low HDL-C and coronary heart disease: the Veterans Affairs HDL Intervention Trial. J Lipid Res. 2004 October;45(10):1885-91.
[0191] Cannon, C. P., et al., Intensive versus moderate lipid lowering with statins after acute coronary syndromes. N Engl J Med, 2004. 350(15): p. 1495-504.
[0192] Castelli, W. P., et al., Incidence of coronary heart disease and lipoprotein cholesterol levels. The Framingham Study. Jama, 1986. 256(20): p. 2835-8.
[0193] Chisolm, G. M. and D. Steinberg, The oxidative modification hypothesis of atherogenesis: an overview. Free Radic Biol Med, 2000. 28(12): p. 1815-26.
[0194] Cockerill, G. W., et al., High-density lipoproteins inhibit cytokine-induced expression of endothelial cell adhesion molecules. Arterioscler Thromb Vasc Biol, 1995. 15(11): p. 1987-94.
[0195] Cohen J C, Kiss R S, Pertsemlidis A, Marcel Y L, McPherson R, Hobbs H H. Multiple rare alleles contribute to low plasma levels of HDL cholesterol. Science. 2004 Aug. 6;305(5685):869-72.
[0196] Erdmann, E., Diabetes and cardiovascular risk markers. Curr Med Res Opin, 2005. 21 Suppl 1: p. S21-8.
[0197] Eronen L, Geerts F, Toivonen H. A Markov chain approach to reconstruction of long haplotypes.
[0198] Frick, M. H., et al., Helsinki Heart Study: primary-prevention trial with gemfibrozil in middle-aged men with dyslipidemia. Safety of treatment, changes in risk factors, and incidence of coronary heart disease. N Engl J Med, 1987. 317(20): p. 1237-45.
[0199] Genest, J. J., et al., Prevalence of risk factors in men with premature coronary artery disease. Am J Cardiol, 1991. 67(15): p. 1185-9.
[0200] Griffiths, A. D., et al., Human anti-self antibodies with high specificity from phage display libraries. Embo J, 1993. 12(2): p. 725-34.
[0201] Gylling, H., et al., Polymorphisms in the ABCG5 and ABCG8 genes associate with cholesterol absorption and insulin sensitivity. J Lipid Res, 2004. 45(9): p. 1660-5.
[0202] Haas, M. J., et al., Suppression of apolipoprotein AI gene expression in HepG2 cells by TNF alpha and IL-1beta. Biochim Biophys Acta, 2003. 1623(2-3): p. 120-8.
[0203] Hargrove, G. M., A. Junco, and N.C. Wong, Hormonal regulation of apolipoprotein AI. J Mol Endocrinol, 1999. 22(2): p. 103-11.
[0204] Hay, B. N., J. A. Sorge, and B. Shopes, Bacteriophage cloning and Escherichia coli expression of a human IgM Fab. Hum Antibodies Hybridomas, 1992. 3(2): p. 81-5.
[0205] Hayashi, N., et al., A single expression system for the display, purification and conjugation of single-chain antibodies. Gene, 1995. 160(1): p. 129-30.
[0206] Hering, S., L. Karawajew, and G. Pasternak, Raji-K562 hybrids and their use for trioma production. Biomed Biochim Acta, 1988. 47(2): p. 211-6.
[0207] Huse, W. D., et al., Generation of a large combinatorial library of the immunoglobulin repertoire in phage lambda. Science, 1989. 246(4935): p. 1275-81.
[0208] Kohier, G. and C. Milstein, Continuous cultures of fused cells secreting antibody of predefined specificity. Nature, 1975. 256(5517): p. 495-7.
[0209] Kozbor, D., A. E. Lagarde, and J. C. Roder, Human hybridomas constructed with antigen-specific Epstein-Barr virus-transformed cell lines. Proc Natl Acad Sci USA, 1982. 79(21): p. 6651-5.
[0210] Krieger, M., The other side of scavenger receptors: pattern recognition for host defense. Curr Opin Lipidol, 1997. 8(5): p. 275-80.
[0211] Kwok, P. Y., Methods for genotyping single nucleotide polymorphisms. Annu Rev Genomics Hum Genet, 2001. 2: p. 235-58.
[0212] Laaksonen, D. E., et al., Metabolic syndrome and development of diabetes mellitus: application and validation of recently suggested definitions of the metabolic syndrome in a prospective cohort study. Am J Epidemiol, 2002. 156(11): p. 1070-7.
[0213] Lakka, H. M., et al., The metabolic syndrome and total and cardiovascular disease mortality in middle-aged men. Jama, 2002. 288(21): p. 2709-16.
[0214] Lewis, G. F. and D. J. Rader, New insights into the regulation of HDL metabolism and reverse cholesterol transport. Circ Res, 2005. 96(12): p. 1221-32.
[0215] Levkau, B., et al., High-density lipoprotein stimulates myocardial perfusion in vivo. Circulation, 2004. 110(21): p. 3355-9.
[0216] Linsel-Nitschke, P. and A-R. Tall, HDL as a target in the treatment of atherosclerotic cardiovascular disease. Nat Rev Drug Discov, 2005. 4(3): p. 193-205.
[0217] Lopez-Candales, A., Metabolic syndrome X: a comprehensive review of the pathophysiology and recommended therapy. J Med, 2001. 32(5-6): p. 283-300.
[0218] Mank-Seymour A R, Durham K L, Thompson J F, Seymour A B, Milos P M. Association between single-nucleotide polymorphisms in the endothelial lipase (LIPG) gene and high-density lipoprotein cholesterol levels. Biochim Biophys Acta. 2004 Feb. 27;1636(1):40-6.
[0219] Manninen, V., et al., Joint effects of serum triglyceride and LDL cholesterol and HDL cholesterol concentrations on coronary heart disease risk in the Helsinki Heart Study. Implications for treatment. Circulation, 1992. 85(1): p. 37-45.
[0220] Miller, N. E., et al., The Tromso heart-study. High-density lipoprotein and coronary heart-disease: a prospective case-control study. Lancet, 1977. 1(8019): p. 965-8.
[0221] Miltiadous G et al, Gene polymorphisms affecting HDL-cholesterol levels in the normolipidemic population. Nutr Metab Cardiovascular Dis. 2005 June; 15(3):219-24.
[0222] Moestrup, S. K. and R. Kozyraki, Cubilin, a high-density lipoprotein receptor. Curr Opin Lipidol, 2000. 11(2): p. 133-40.
[0223] Moestrup, S. K., et al., The intrinsic factor-vitamin B12 receptor and target of teratogenic antibodies is a megalin-binding peripheral membrane protein with homology to developmental proteins. J Biol Chem, 1998. 273(9): p. 5235-42.
[0224] Mooradian, A. D., M. J. Haas, and N. C. Wong, Transcriptional control of apolipoprotein A-I gene expression in diabetes. Diabetes, 2004. 53(3): p. 513-20.
[0225] Morabia A, Ross B M, Costanza M C, Cayanis E, Flaherty M S, Alvin G B, Das K, James R, Yang A S, Evagrafov O, Gilliam T C. Population-based study of SR-BI genetic variation and lipid profile. Atherosclerosis. 2004 July;175(1):159-68.
[0226] Nash, D. T., Cardiovascular risk beyond LDL-C levels. Other lipids are performers in cholesterol story. Postgrad Med, 2004. 116(3): p. 11-5.
[0227] National Cholesterol Education Program, Executive Summary of The Third Report of The National Cholesterol Education Program (NCEP) Expert Panel on Detection, Evaluation, And Treatment of High Blood Cholesterol In Adults (Adult Treatment Panel III). Jama, 2001. 285(19): p. 2486-97.
[0228] Navab, M., et al., The oxidation hypothesis of atherogenesis: the role of oxidized phospholipids and HDL. J Lipid Res, 2004. 45(6): p. 993-1007.
[0229] Nielsen, P. E., et al., Sequence-selective recognition of DNA by strand displacement with a thymine-substituted polyamide. Science, 1991. 254(5037): p. 1497-500.
[0230] Peltonen L, Jalanko A, Varilo T. Molecular genetics of the Finnish disease heritage. 1999. Hum Mol Genet. 8: 1913-23.
[0231] Pi-Sunyer, F. X., The epidemiology of central fat distribution in relation to disease. Nutr Rev, 2004. 62(7 Pt 2): p. S120-6.
[0232] Ross, R., Atherosclerosis—an inflammatory disease. N Engl J Med, 1999. 340(2): p. 115-26.
[0233] Rubins, H. B., et al., Gemfibrozil for the secondary prevention of coronary heart disease in men with low levels of high-density lipoprotein cholesterol. Veterans Affairs High-Density Lipoprotein Cholesterol Intervention Trial Study Group. N Engl J Med, 1999. 341(6): p. 410-8.
[0234] Salonen, J. T., et al., Autoantibody against oxidised LDL and progression of carotid atherosclerosis. Lancet, 1992. 339(8798): p. 883-7.
[0235] Salonen, J. T., et al., Polymorphism in high density lipoprotein paraoxonase gene and risk of acute myocardial infarction in men: prospective nested case-control study. BMJ, 1999. 319(7208): p. 487-9; discussion 490.
[0236] Salonen J T, Nyyssonen K, Korpela H, Tuomilehto J, Seppanen R, Salonen R. High stored iron levels are associated with excess risk of myocardial infarction in eastern Finnish men. Circulation. 1992. 86(3): p. 803-11.
[0237] Salonen, J. T., Is there a continuing need for longitudinal epidemiologic research? The Kuopio Ischaemic Heart Disease Risk Factor Study. Ann Clin Res, 1988. 20(1-2): p. 46-50.
[0238] Salonen J T, Salonen R, Seppanen K, Rauramaa R, Tuomilehto J. HDL, HDL2, and HDL3 subfractions, and the risk of acute myocardial infarction. A prospective populations study in Eastern Finnish men. Circulation 1991. 84: p 129-39.
[0239] Sampietro, T., et al., [High-density lipoproteins: the “new” target of cardiovascular medicine]. Ital Heart J Suppl, 2005. 6(6): p. 341-53.
[0240] Scheen, A. J., Pathophysiology of type 2 diabetes. Acta Clin Belg, 2003. 58(6): p. 335-41.
[0241] Singaraja, R. R., et al., Human ABCA1 BAC transgenic mice show increased high density lipoprotein cholesterol and ApoAI-dependent efflux stimulated by an internal promoter containing liver X receptor response elements in intron 1. J Biol Chem, 2001. 276(36): p. 33969-79.
[0242] Stamler J, Greenland P, Neaton J D. 1998. The established major risk factors underlying epidemic coronary and cardiovascular disease. CVD Prevention 1: 82-97.
[0243] Stephens, J. W. and S. E. Humphries, The molecular genetics of cardiovascular disease: clinical implications. J Intern Med, 2003. 253(2): p. 120-7.
[0244] Syvanen, A. C., Accessing genetic variation: genotyping single nucleotide polymorphisms. Nat Rev Genet, 2001. 2(12): p. 930-42.
[0245] Thompson J F, Durham L K, Lira M E, Shear C, Milos P M. CETP polymorphisms associated with HDL cholesterol may differ from those associated with cardiovascular disease. Atherosclerosis. 2005 July;181(1):45-53.
[0246] Tietge, U. J., et al., Human secretory phospholipase A2 mediates decreased plasma levels of HDL cholesterol and apoA-I in response to inflammation in human apoA-I transgenic mice. Arterioscler Thromb Vasc Biol, 2002. 22(7): p. 1213-8.
[0247] Todorova, B., et al., The G-250A promoter polymorphism of the hepatic lipase gene predicts the conversion from impaired glucose tolerance to type 2 diabetes mellitus: the Finnish Diabetes Prevention Study. J Clin Endocrinol Metab, 2004. 89(5): p. 2019-23.
[0248] Toivonen H T, Onkamo P, Vasko K, Ollikainen V, Sevon P, Mannila H, Herr M, Kere J. Data mining applied to linkage disequilibrium mapping. Am J Hum Genet. 2000 July;67(1):133-45.
[0249] Tornvall, P., et al., Lipoprotein lipase mass and activity in plasma and their increase after heparin are separate parameters with different relations to plasma lipoproteins. Arterioscler Thromb Vasc Biol, 1995. 15(8): p. 1086-93.
[0250] Tremoli, E., et al., Tissue factor in atherosclerosis. Atherosclerosis, 1999. 144(2): p. 273-83.
[0251] Tuomainen, T. P., et al., Increased risk of acute myocardial infarction in carriers of the hemochromatosis gene Cys282Tyr mutation: a prospective cohort study in men in eastern Finland. Circulation, 1999. 100(12): p. 1274-9.
[0252] Uittenbogaard, A., et al., High density lipoprotein prevents oxidized low density lipoprotein-induced inhibition of endothelial nitric-oxide synthase localization and activation in caveolae. J Biol Chem, 2000. 275(15): p. 11278-83.
[0253] Wadham, C., et al., High-density lipoproteins neutralize C-reactive protein proinflammatory activity. Circulation, 2004. 109(17): p. 2116-22.
[0254] Vaisman, B. L., et al., ABCA1 overexpression leads to hyperalphalipoproteinemia and increased biliary cholesterol excretion in transgenic mice. J Clin Invest, 2001. 108(2): p. 303-9.
[0255] Vajo, Z., J. G. Terry, and E. A. Brinton, Increased intra-abdominal fat may lower HDL levels by increasing the fractional catabolic rate of Lp A-I in postmenopausal women. Atherosclerosis, 2002. 160(2): p. 495-501.
[0256] Wang, M. and M. R. Briggs, HDL: the metabolism, function, and therapeutic importance. Chem Rev, 2004. 104(1): p. 119-37.
[0257] Wang, N., et al., ATP-binding cassette transporters G1 and G4 mediate cellular cholesterol efflux to high-density lipoproteins. Proc Natl Acad Sci USA, 2004. 101(26): p. 9774-9.
[0258] Waters, D. D., et al., Treating to New Targets (TNT) Study: does lowering low-density lipoprotein cholesterol levels below currently recommended guidelines yield incremental clinical benefit? Am J Cardiol, 2004. 93(2): p. 154-8.
[0259] World Health Organization.2004. Cardiovascular diseases: prevention and control. Information sheet. http://www.who.int/dietphysicalactivity/media/en/gsfs_cvd.pdf (Accessed 14 Jul. 2004)
[0260] Williams C L, Hayman L L, Daniels S R, Robinson T N, Bazzarre T. Cardiovascular health in childhood: A statement for health professionals from the Committee on Atheroscelrosis, Hypertension, and Obesity in the Young (AHOY) of the Council on Cardiovascular Disease in the Young, American Heart Association. Circulation. 2002 Jul. 2; 106(1): 143-60.
[0261] Yuhanna, I. S., et al., High-density lipoprotein binding to scavenger receptor-BI activates endothelial nitric oxide synthase. Nat Med, 2001. 7(7): p. 853-7.

1. A method for preventing or treating of a low high density lipoprotein (HDL) condition or trait in a mammalian subject comprising modulation of biological activity, function or concentration of at least one polypeptide encoded by HDL associated genes set forth in tables 1, 8 and 9 in said subject.

2. The method according to claim 1, wherein a low HDL condition or trait is any condition or trait in which the HDL-C level of a subject is below the accepted normal HDL-C levels.

3. The method according to claim 1, wherein the HDL-C level of a subject is below the average HDL-C level of the related population.

4. The method according to claim 1, wherein the HDL-C level of a subject is below 1.3 mmol/l.

5. The method according to claim 1, wherein the subject with normal HDL-C levels has increased risk to a low HDL-C condition or trait.

6. The method according to claim 1, wherein the low HDL condition or trait comprises lipid disorders, inflammation, cancer, Alzheimer disease, oxidative stress, smoking, obesity, cardiovascular disease, type 2 diabetes and the metabolic syndrome.

7. The method according to claim 1, wherein the subject is at elevated risk of a low HDL-C condition or trait because of family history.

8. The method according to claim 6, wherein the lipid disorder comprises low high density lipoprotein, low ApoA1 lipoprotein, elevated VLDL, elevated LDL-C level, elevated triglycerides level or elevated total cholesterol level.

9. The method according to claim 6, wherein the inflammation is characterized by elevated levels of one or several inflammation markers such as but not limited to C-reactive protein, fibrinogen, leukocyte count or amyloid A.

10. The method according to claim 6 wherein oxidative stress is characterized by elevated levels of one or several oxidative stress markers such as oxidatively modified lipids or lipoproteins, autoantibodies against oxidatively modified lipids or lipoproteins, oxidatively modifies bases, nucleotides or DNA or RNA, or oxidatively modified proteins.

11. The method according to claim 1 comprising administering to a mammalian subject in need of such treatment an effective amount of a compound in a pharmaceutically acceptable carrier altering expression of one or more genes set forth in tables 1, 8 and 9.

12. The method according to claim 1 comprising administering to a mammalian subject in need of such treatment an effective amount of a compound in a pharmaceutically acceptable carrier altering biological activity or function of polypeptides encoded by one or more genes set forth in tables 1, 8 and 9.

13. The method according to claim 1 comprising administering to a mammalian subject in need of such treatment an effective amount of a compound in a pharmaceutically acceptable carrier altering activity or function of a biological network or a metabolic pathway related to a gene set forth in table 1, 8 or 9.

14. The method according to claim 1 comprising administering to a mammalian subject in need of such treatment an effective amount of a compound in a pharmaceutically acceptable carrier altering activity of a pathophysiological pathway related to a gene set forth in table 1, 8 or 9.

15. The method according to claim 1 comprising a recombinant polypeptide encoded by a HDL-C associated gene set forth in table 1, 8 or 9, or variants, fragments or derivatives thereof.

16. The method according to claim 1 comprising gene therapy or gene transfer of at least one HDL-C associated gene set forth in table 1, 8 or 9, or variants, fragments or derivatives thereof.

17. The method according to claim 16, wherein said HDL-C associated gene, or its variants, fragments or derivatives thereof are associated with increased levels of HDL-C.

18. The method according to claim 16, wherein said therapy comprises a polynucleotide hybridising under physiological conditions to the regulatory regions and/or to the polypeptide encoding region of a HDL-C associated gene set forth in table 1, 8 or 9, or variants, fragments or derivatives thereof in somatic cells, in stem cells, or in affected tissues of said subject.

19. The method according to claim 16 comprising sequence specific gene silencing agents such as small interfering RNA (siRNA) or small hairpin RNA (shRNA) hybridising to mRNA and/or to hnRNA of a HDL-C associated gene set forth in tables 1, 8 or 9.

20. The method according to claim 16 comprising sequence specific gene silencing agents such as siRNA or shRNA hybridising to mRNA and/or to hnRNA of a gene in a biological network or a metabolic pathway related to a gene set forth in table 1, 8 or 9.

21. The method according to claim 1, wherein said treatment is based on a dietary treatment or a vaccination.

22. A method for identifying a compound for prevention or treatment of a low HDL-C condition or trait comprising determining the effect of a compound on the biological activity or function of at least one polypeptide encoded by the HDL-C associated genes set forth in tables 1, 8 and 9 in living cells, wherein a compound altering biological activity or function of said polypeptide is considered useful in prevention or treatment of low HDL-C condition or trait.

23. The method according to claim 22 comprising determining the effect of a compound on the biological activity or function of a biological network or a metabolic pathway related to a HDL-C associated gene set forth in table 1, 8 or 9, wherein a compound altering biological activity or function of a biological network or metabolic pathway is considered useful in prevention or treatment of low HDL-C condition or trait.

24. The method according to claim 22 comprising non-human transgenic animals, mammalian tissues, organs or organ systems or cultured microbial, insect or mammalian cells expressing one or more of the HDL-C level associated genes set forth in tables 1, 8 and 9.

25. The method according to claim 22 comprising non-human knock-out animals having one or more of the said HDL-C level associated genes inactivated.

26. A pharmaceutical composition for prevention or treatment of a low HDL-C trait or condition comprising one or more compounds in a pharmaceutically acceptable carrier modulating biological activity, function or concentration of a polypeptide encoded by a HDL-C level associated gene set forth in table 1, 8 or 9 in a mammalian subject.

27. The pharmaceutical composition according to claim 26 comprising one or more compounds in a pharmaceutically acceptable carrier modulating the biological activity or function of a biological network or a metabolic pathway related to said HDL-C associated gene set forth in table 1, 8 or 9.

28. A method for manufacturing a medicament for preventing or treating of a low HDL-C condition or trait in a mammalian subject comprising a compound modulating biological activity, function or concentration of at least one polypeptide encoded by HDL-C level associated genes set forth in tables 1, 8 and 9 in said subject.

29. A method for selecting efficient and safe HDL-C level increasing therapy to a subject comprising:
a) providing a biological sample taken from the subject;
b) assessing type and/or level of at least one biomarker in said sample, wherein said biomarkers are associated to one or more of the HDL-C related genes set forth in tables 1, 8 and 9, or said biomarkers are associated to biological networks or metabolic pathways related to said genes; and
c) using the biomarker data to select efficient and safe therapy for the subject.

30. The method according to claim 29, wherein at least one biomarker is selected from polymorphic sites residing in genomic regions containing the genes set forth in tables 1, 8 and 9.

31. The method according to claim 29, wherein at least one biomarker is selected from SNP markers set forth in tables 2 to 7 and 10 to 11.

32. The method according to claim 29, wherein at least one biomarker is selected from polymorphic sites associated with one or more of the SNP markers set forth in tables 2 to 7 and 10 to 11.

33. The method according to claim 29, wherein at least one biomarker is selected from polymorphic sites being in complete linkage disequilibrium with one or more of the SNP markers set forth in tables 2 to 7 and 10 to 11.

34. The method according to claim 29, wherein at least one biomarker is selected from expression products of the genes set forth in tables 1, 8 and 9.

35. The method according to claim 29, wherein at least one biomarker is selected from the polypeptides encoded by the genes set forth in tables 1, 8 and 9.

36. The method according to claim 29, wherein at least one biomarker is selected from the metabolites of the polypeptides encoded by the genes set forth in tables 1, 8 and 9.

37. The method according to claim 29, wherein the low HDL-C condition or trait is any condition or trait in which the HDL-C level of a subject is below the accepted normal HDL-C levels.

38. The method according to claim 29, wherein the HDL-C level of a subject is below the average HDL-C level of the related population.

39. The method according to claim 29, wherein a low HDL-C condition or trait comprises lipid disorders, inflammation, cancer, Alzheimer disease, oxidative stress, smoking, obesity, cardiovascular disease, type 2 diabetes or the metabolic syndrome.

40. The method according to claim 29 further comprising step d) combining personal and clinical information with the biomarker data to make the selection of the therapy.

41. The method according to claim 40, wherein the personal and clinical information, i.e. non-genetic information concerns age, gender, behaviour patterns and habits, biochemical measurements, clinical measurements, obesity, T2D, cardiovascular disease, dyslipoproteinemia, waist-to-hip circumference ratio (cm/cm), socioeconomic status, psychological traits and states, the medical history of the subject and the family history of said conditions.

42. The method according to claim 40, wherein the dyslipoproteinemia comprises high VLDL level and/or high LDL-C level or/and high triglyceride level and/or high total cholesterol level.

43. The method according to claim 40, wherein the clinical information comprises high plasma level of markers of inflammation at any moment of lifespan.

44. The method according to claim 40, wherein the clinical information comprises high plasma level of markers of oxidative stress.

45. The method according to claim 40, wherein the behaviour patterns and habits include tobacco smoking, physical activity, dietary intakes of nutrients, alcohol intake and consumption patterns and coffee consumption and quality.

46. The method according to claim 40, wherein the biochemical measurements include determining blood, serum or plasma VLDL, LDL, HDL or total cholesterol or triglycerides, ApoA1, fibrinogen, ferritin, transferrin receptor, C-reactive protein, glucose or insulin concentration.

47. A test kit based on a method of claim 29 for selecting efficient and safe HDL-C level increasing therapy to a subject comprising:
a) reagents, materials and protocols for assessing type and/or level of one or more biomarkers in a biological sample, wherein said biomarkers are associated to one or more of the HDL-C related genes set forth in tables 1, 8 and 9, or said biomarkers are associated to biological networks or metabolic pathways related to said genes; and
b) instructions and software for using the biomarker data to select efficient and safe therapy for the subject.

48. The test kit according to claim 47 further comprising questionnaire and instructions for collecting personal and clinical information from the subject.

The application's sequence listing, which the Patent Office published only in electronic form, follows.

SEQUENCE LISTING (2584 sequences)

SEQ ID NO: 1 - DNA, 101 bp, Homo sapiens
aatcagttgatgtggactttctgttgtgcatctcgaactttaatcactgtrgtaaaattcctttgtagagatcaaggctgcatcgagccaagatcatggca

SEQ ID NO: 2 - DNA, 101 bp, Homo sapiens
tcaagcccaagacaaacgtgatcctactccgtgcctttggttcagtcttgyttgttggtcatttaggcacaaactccaaatgatttcccatgcaggtcagt

SEQ ID NO: 3 - DNA, 101 bp, Homo sapiens
atctccaaactataagtctaggaaatatttttcatgaacctgtactagagraggcataaccaaaacaacaacaacaaaaaacatgtttccccttccagaat

SEQ ID NO: 4 - DNA, 101 bp, Homo sapiens
gctggaaagggcaacggagactgagtagtggcctgagaaaatctctgttcytggtttctttctgcatcccaccagccctgggttcctgcgcacatgcacac

SEQ ID NO: 5 - DNA, 101 bp, Homo sapiens
tgagtgaactattttttaattatgcctcaataatgaattaaatcacagacmgtattatgaaatactgtacagatgacagaaaccccccccaccccaagttg

SEQ ID NO: 6 - DNA, 101 bp, Homo sapiens
tttcaaatgtgagaaaactcctttagaagttttagtcttcatgagtcttaygcgcttagggtgtggatttaaattagcaaattgggttgttggatttgtag

SEQ ID NO: 7 - DNA, 101 bp, Homo sapiens
ggaaaggccatgcaaagaaaatggcatgtgagggtcttggaaaaagaatargagtttgccaactagacaagcaggggagatcattgcgggcacaggaaaca

SEQ ID NO: 8 - DNA, 101 bp, Homo sapiens
tcctcgaactctaaatggtccagttatatcaaatgccttacagatattgargttccatattctctttttccccatctgaaactcctttcccttgacttttt

SEQ ID NO: 9 - DNA, 101 bp, Homo sapiens
atacgactctgccccaacctgcttttccatgttatcttccattactttccmagctgtatctgatgatctagggaaagcctgatgcttcccaaggatcttga

SEQ ID NO: 10 - DNA, 101 bp, Homo sapiens
atcacatcaaggaaccgccgatcagcaggagtctcctgggactataaaaaygaaaaagaaatgtctttgggtatgtgactgacagttggccaaggtgggtg

SEQ ID NO: 11 - DNA, 101 bp, Homo sapiens
taattacactgcctgccattccctgaggcctttaaaatatttctctgatgrtatggaatctgagctcctgactgataaaagctttgagtttcacaagagct

SEQ ID NO: 12 - DNA, 101 bp, Homo sapiens
acacatttgggcgtgcaaaaatatcgcattgctttctttttagctttaagwtcagctcaatccaacataagccctctatctctctgggctgatgggagatt

SEQ ID NO: 13 - DNA, 101 bp, Homo sapiens
tttgtctcctagcaaagagctcaatgaacatgtatagaataaatgacttgrtttgatatgagctatgattaactcttttctccaggagtgctctgccaaga

SEQ ID NO: 14 - DNA, 101 bp, Homo sapiens
agcagtcaggagtgagagaagcggataagaaaaatatgagaggaaatcaasgacgagtctcaggtttctagtttaggcgaatgggtgatagtggattaagg

SEQ ID NO: 15 - DNA, 101 bp, Homo sapiens
gtattccacattgtgtcagctggggtcactcacatggctgcgttcatcatygagcttggctaggtttccagttaccaagaaggcctcactcacgtatctga

SEQ ID NO: 16 - DNA, 101 bp, Homo sapiens
ataaatatgacaacttagaagaaatggaccaaatcttcaaaatcccaaaarttacaaaacataccaagatagagaggataacctgactagccctatacgac

SEQ ID NO: 17 - DNA, 101 bp, Homo sapiens
cttctctaagcttgggcatgcatttagtcagtccataagtgttacttttckgtagacaggtttttgcaatatactcctaaggaaatgagatatgctcatct

SEQ ID NO: 18 - DNA, 101 bp, Homo sapiens
tgagcagaactgggaaaatgttaaggactctctttgcacttttagcttaasgtctaggctaggaaatgcctcagaagacaaatgaagcctcccttcccctg

SEQ ID NO: 19 - DNA, 101 bp, Homo sapiens
tattctcctacttttttcagtttaactttagtttcacctttcacaataaartctttaacttaactttgtatgtaaaattaatatttacacacaattccaag

SEQ ID NO: 20 - DNA, 101 bp, Homo sapiens
ttattttgataagatacttcaaatagcctccaaaagtgtagatccaatcayttaaataaacctgtatgtatatgcatatgtgtacatgcatatcccctcct

SEQ ID NO: 21 - DNA, 101 bp, Homo sapiens
gttgggattacaggtgtgagccaccgcgcccggccagttatatgttttttraagaagaacttatatcatatattttttgtgtttctcatctcccagactct

SEQ ID NO: 22 - DNA, 101 bp, Homo sapiens
agaggcagagtcagagtttccttctgggttattatttgaaaggtgcataayggactcccttctctggccaaaaatgtatttcttccgctgacctgtcccag

SEQ ID NO: 23 - DNA, 101 bp, Homo sapiens
ttgaaaggtgcataacggactcccttctctggccaaaaatgtatttcttcygctgacctgtcccagctgatttcatataacctctcttaaaagagctttca

SEQ ID NO: 24 - DNA, 101 bp, Homo sapiens
ttcccctaggtatctgacaggagcaaattcatgaccccactagtgtaatakatcattatccaaaacttcaaattatctctagaaatgtttacctcatcttt

SEQ ID NO: 25 - DNA, 101 bp, Homo sapiens
cttgaaagtcactatcagcgcaaaacgtttggcctgactgggtgagggatrcgtaacaacatcatatggcaaagataagattagatattcaacacttcttt

SEQ ID NO: 26 - DNA, 101 bp, Homo sapiens
catgaaatcccaaaatgtagaaaactatttatgggagataactgaaagggwattgattcactggatagtaaggaatggacaaatttaaagtttgtttccaa

SEQ ID NO: 27 - DNA, 101 bp, Homo sapiens
gcacttcagccagagcaaaagaggattgaggttttaaaagaaagagtcatkttctcaagaagactagaagagtggaatgtagaaaaagaaagaaaagatga

SEQ ID NO: 28 - DNA, 101 bp, Homo sapiens
tcttcaatatgtcagcgttattcagtttccttcattctgtcaatgttctarttatacacggataaattagttccctctccagattctccagtcaacaaatt

SEQ ID NO: 29 - DNA, 101 bp, Homo sapiens
gactattcttgtacatgaatttgacttctgttgaatccaaagaatgactgygtctactcaatctgttcatccatccatggtaggcagattgtaagatggct

SEQ ID NO: 30 - DNA, 101 bp, Homo sapiens
gcagatcccttctaggtgagccctcttgtaccttgggctcctcctaagatractgaaggacaatgcccttaaacttagttcaatcattgtggaagacagtg

SEQ ID NO: 31 - DNA, 101 bp, Homo sapiens
ttgcagaaatatgttttgaaatgattatcctttctctactgaatttctttygcacttgtgtccaaaaaggatttccatatacatgtgggtctatttctgga

SEQ ID NO: 32 - DNA, 101 bp, Homo sapiens
catctgttcgtttctttctgttgcaaagaagtgctttattgcatagaaacrcgatttgtatgggaataacatgggaataactcattctgatgaaaatttgg

SEQ ID NO: 33 - DNA, 101 bp, Homo sapiens
taaaatattggtaatttttccaggtttcttttatgtagtaattttacttcmtcttcaatagctatttttgacttaccagtatacccaaccaccaccttatt

SEQ ID NO: 34 - DNA, 101 bp, Homo sapiens
ctttcacattttgatctgctatcaatctttaattgatttttcataatgtaygaggtaggaatccatatacgttttgttttgccttataatggactcagcac

SEQ ID NO: 35 - DNA, 101 bp, Homo sapiens
tcagtacctagtatatttcctgacacatggttggtgctcagtgaatatctstcaagtcaatgaataaatgaaggaagaaagaaaaaactaatatttattaa

SEQ ID NO: 36 - DNA, 101 bp, Homo sapiens
tatattaaatagacactcagtctaccacgttcacggtcttcagtttgcttsgaaattatgtttccacatgcttttgtacaagctgttgttaactcccttaa

SEQ ID NO: 37 - DNA, 101 bp, Homo sapiens
atacctatctattgattgatcagtcattgcatatagtcattccatggtgaragcaatataaagtctgtaagtcttacagggcccttgaattactcatttaa

SEQ ID NO: 38 - DNA, 101 bp, Homo sapiens
attttgtcctcccctaacgattctttttttgttattcgttactaagatgasatagttagagctgcaagaaatgcatgcctctggttagcccttaaagacaa

SEQ ID NO: 39 - DNA, 101 bp, Homo sapiens
ggcacaaatcccatatgtactggcattgctatttgcaaatttgtagtaccrcacacaaaaatgtagtacaagcttctctcacaaatgacctacaacaaacc

SEQ ID NO: 40 - DNA, 101 bp, Homo sapiens
tttgaaaattatatgtaggactttaaaatgatgagacaatttgcaatattragtttcaagtctgtcttagggaagtcagaagtcttaaggattcagtggtg

SEQ ID NO: 41 - DNA, 101 bp, Homo sapiens
cataatttttcagctcatattcctgatttaagttcatatttctcctcaatrtatacagccccatcttaagattttttcccttagggataggttcaaattac

SEQ ID NO: 42 - DNA, 101 bp, Homo sapiens
tataacacagaaggtacttcatatctggttttgagtaatactcaaagtacrataacctcaacaccatctagattctcttcctatgaggcagagtataatga

SEQ ID NO: 43 - DNA, 101 bp, Homo sapiens
agggaaacagtatatgcaaaagcccagaattgaaagagagtatatattatsagagtatgaaaattgttcagtgactgaagtgctgggtggtagagagtaaa

SEQ ID NO: 44 - DNA, 101 bp, Homo sapiens
aaaagttttgtctagaattcctaaaaataactattacattactcctacttyactgaaaaaaattatttggttagtactgtatttgttatgggaatcttcct

SEQ ID NO: 45 - DNA, 101 bp, Homo sapiens
taggggattttttttgtttttgttttcttcagtaattcttgttctgaggaytgttagttttttgaagtccagttatgggagatggatcctcagggttccct

SEQ ID NO: 46 - DNA, 101 bp, Homo sapiens
aatgataacaaataaacttaaatagtgagtaaaaagaatcataagtgaaayaaccaaatataaaaggagtcagaaaaaaataagaggtcttgagaggtgtg

SEQ ID NO: 47 - DNA, 101 bp, Homo sapiens
tgaatgtgtacatataagcttgtggtaaaaatctagaattttcaatgtagyatatctgaatcctatttttttcctctgggttgtcctactgtgcagtataa

SEQ ID NO: 48 - DNA, 101 bp, Homo sapiens
tcttgaggtagtcttctttgggttaaatctgcttagtgttctataaccttygtctacttgaatattgatatccttctgtaggtttgggaagttctctgtta

SEQ ID NO: 49 - DNA, 101 bp, Homo sapiens
cctgcaaacctattttttcccatacactgttctaattagtcatataaaatygagtctgtgtattataagcaattattttagtggaagtagaaactgaatct

SEQ ID NO: 50 - DNA, 101 bp, Homo sapiens
ctcccagatccagaaggccatactaccagctacttattgcactttaagttyggagtaatatattttgcatattagattcaacataatatttatcatttaat

SEQ ID NO: 51 - DNA, 101 bp, Homo sapiens
gagagttagaacaactggggaaggcaggcattgaactaagacagaagtgayttgaatatttcaatctagaggatataaactttggtgcaactggagaaagc

SEQ ID NO: 52 - DNA, 101 bp, Homo sapiens
agatagcttctaagtcactgagggtatgaatgcaaaattgcaaatactgartgtttcctccagataataaggattaaaagatcaagaggcagataaagaga

SEQ ID NO: 53 - DNA, 101 bp, Homo sapiens
ttaagctttggattaaaaataagttttgcaccttatttttaatgcctatcktatattccttactgcataaatcagaagaatctcaatattaaataatctaa

SEQ ID NO: 54 - DNA, 101 bp, Homo sapiens
acgaggagcagatacattgttcaaaggctgaacctgtttttttaaaaaaaygatgtctggtgtgaatgactttgatagcagccaggaacaggaagtagagt

SEQ ID NO: 55 - DNA, 101 bp, Homo sapiens
tggggctataactgtgaataaaatagacaaaaattcttgcctttgtggaamttaaatgctagcagtatgtatatactgcaaacatatacaacagacaagat

SEQ ID NO: 56 - DNA, 101 bp, Homo sapiens
acatgttttgttattttcatttaaagcatacctctttcctatatttccctrtacatgaccttcataactatacttttaaagaaatacgtaaatattcctct

SEQ ID NO: 57 - DNA, 101 bp, Homo sapiens
ataggggcacacatgactgaagcacaatgagaaagggggttgggatacttrgaatagatggatcatgattatggtccataataatattttgtcttgatgtt

SEQ ID NO: 58 - DNA, 101 bp, Homo sapiens
actctgctgtctgcaccctctgggtctggtgtggctctgcttcttggtgcytcaactctgactggcagctgtccccaggaggcgataattcagcatgttca

SEQ ID NO: 59 - DNA, 101 bp, Homo sapiens
taaatataatgttaataaaaagaatacataaaactaatagcctgaatgacrgacccagtggatatgacttgcttggggaattcgagtgactctggctttga

SEQ ID NO: 60 - DNA, 101 bp, Homo sapiens
ttaaaagtgtcttagcttttggaatgcttgctatagatttgcccatattaracctaaaaagagcaagcgtgtcagcgctggagcaatgagagtatgtagag

SEQ ID NO: 61 - DNA, 101 bp, Homo sapiens
acataaattatgtttcaacatttggtagctggaaagattcactgaagtgtytgcttactgattattaactagtaaaatgaggctaataaagttaagttaca

SEQ ID NO: 62 - DNA, 101 bp, Homo sapiens
gcccacatgaataacaaggccaggctatcacatcacttcaggtttcagtgwtgcagctaattgagtaactccttgtatgacgagtgcgtatgaatagacag

SEQ ID NO: 63 - DNA, 101 bp, Homo sapiens
atacagtccagcccttacttgtccaagttgtatgagaccatagtaaaatgygggcttgggctacatccctgtgaagtttctcttgaatgtcgagttgatcg

SEQ ID NO: 64 - DNA, 101 bp, Homo sapiens
cagtggctttctaatgctgacctcttgcttgcctgcatctcagcacatttyaccttgcggaatttccgatttgtgtcctgagcatttctgccagaacagtt

SEQ ID NO: 65 - DNA, 101 bp, Homo sapiens
tagtttcctcagaattgaagggcagggagcttggggattaggcccatgaayggaaagtcctcaggaatccaggcaacagctgtcaccatttcattctccct

SEQ ID NO: 66 - DNA, 101 bp, Homo sapiens
catgcagtctagttttggagttcaacttgacattataatatttgattattwtgcttcattttaggaagaaaggccgagtagcttaagctttctcgtatgaa

SEQ ID NO: 67 - DNA, 101 bp, Homo sapiens
tctcaaggacggagagatgggaattcactgaacttagagaacttagagaayggaatatgtaaactgttgcttaataagttgttattaaataactatgcaca

SEQ ID NO: 68 - DNA, 101 bp, Homo sapiens
ctgactgaggtagtgtttgtcagttttctctgttgtaaagttattctcgtkttctccatttccatttccttttttccatatagacttctctttgaaaggaa

SEQ ID NO: 69 - DNA, 101 bp, Homo sapiens
ggaaatgttgataatgctgcatacacttgaaataggagtgaagggagataygtaaaatgcctagcaaagtgcctgagcataataaatgtgattactgtcct

SEQ ID NO: 70 - DNA, 101 bp, Homo sapiens
tatctaaccttatggctcccattgtgaccaccacattgttcatccagaacrttcctgacaataattatgaagcagtctagtctctccatcactttctggat

SEQ ID NO: 71 - DNA, 101 bp, Homo sapiens
aactgtaatatattttataagtgatttgcctaaatatgtgaggctgtattyactcagtttctcaagaagcatttcttgagaagctactgtgtgccagagcc

SEQ ID NO: 72 - DNA, 101 bp, Homo sapiens
aaaaaatagaatgctttcccattattgcttctttgcttctggtaaccagtmttcaggagtaattagtttgataattagttcgagatgtcatttaaaaagaa

SEQ ID NO: 73 - DNA, 101 bp, Homo sapiens
gttcgagatgtcatttaaaaagaagcaatttttaatggactaacttgaaarcaatcttttatcttatgctggatgatttttcttaatgaattaaataaaca

SEQ ID NO: 74 - DNA, 101 bp, Homo sapiens
cgttgggggacattcttcatgggataaaactcgacttctttaaagctgtamcctattaatccacagtgcaacccaaagactggaaaagcaaagtgaaaggc

SEQ ID NO: 75 - DNA, 101 bp, Homo sapiens
acatggactagggggtgtgggtgtgagtggtaagcatattaaactctcccytacagagtgggcaatcttcctttgaagttactctttaaataaagtatcgt

SEQ ID NO: 76 - DNA, 101 bp, Homo sapiens
agtatttgataaattgatcctttggatccaagggacaggaaatccatgtgrtcatacactctcctgatagttgttaggcttgtgaaaacagccagattctg

SEQ ID NO: 77 - DNA, 101 bp, Homo sapiens
ttctcttccatcagcaaacaccttctcctactttatacttcgaaatttaartaaaatatcatagctccagaaaacttttccttatatctccaggtgagccc

SEQ ID NO: 78 - DNA, 101 bp, Homo sapiens
gatcagcaggtgaaatggtcctggcttccagagtatgtgctagtccaacartgcaaagagatcgaatttgtccatttggttccttaatcagaaatcagaaa

SEQ ID NO: 79 - DNA, 101 bp, Homo sapiens
gtccaattctatgctaaacagtctcacaagtgctatctcatttaattatcycaattctgtaaagtagatattattaactttaccaatgaggaaactgaagc

SEQ ID NO: 80 - DNA, 101 bp, Homo sapiens
tccaaaagaagaatagtttaagagtttgacactttattttctacattgcayaaatcgtccacacagaaaatacatcatccagacagaaaatcaccaaagga

SEQ ID NO: 81 - DNA, 101 bp, Homo sapiens
tctaatttttcatgatatacaacacccatatgtaaattgtaatagccatcrtacgcttcctttcttggtgagaactacagctatcagccaggcatcgggtt

SEQ ID NO: 82 - DNA, 101 bp, Homo sapiens
gtgtactgtgagaaggaaacgacaccctaaaattacattagctttgcagtkactcgttcagagaagcttgcatagtggagttcatacctattcattattaa

SEQ ID NO: 83 - DNA, 101 bp, Homo sapiens
caggagaggagatgggctccacccctaagcacaaagtgttgaaaggaagaygagacacataaacctgtgacgtgggtattgacaagagctgtgagagctca

SEQ ID NO: 84 - DNA, 101 bp, Homo sapiens
tcagggatctttggcttgacaaaatgagtttgcattagccattgttttcartgaaaggtgtaaggtataaggcgttcaaaaaacagaagtcctgattactg

SEQ ID NO: 85 - DNA, 101 bp, Homo sapiens
tcagctcaatgtctgctacacggttagcattcatttaaaaaatgtcgaatrcacgaatgaataattcagctgtcgtattcctaatattggagtacttttgg

SEQ ID NO: 86 - DNA, 101 bp, Homo sapiens
tttctattaatacatactttcctcctttcccttcatttcaaggtatcaccrtctccaatttagaagagtaccatgaaaccagggtttgaggggtgggcaga

SEQ ID NO: 87 - DNA, 101 bp, Homo sapiens
acagatgtttgtactgtccccaagaaggttatagccttagcaggatcaatraagacatgcaacaaagaaagtagcaacaacccattgaagagggtgttgat

SEQ ID NO: 88 - DNA, 101 bp, Homo sapiens
attagtaaagcttgatactgagtaaaatctctgatttgagcctgatttgasagtttgatcttttgtgttagctcaatagcaaaaataaaaaaaatttgata

SEQ ID NO: 89 - DNA, 101 bp, Homo sapiens
gagactccatctttagacggagaatccatcaagcataatgtcttgttatgmtcgcacttgattcaagaggctttagtctgcttaaggtaaaatacaactgt

SEQ ID NO: 90 - DNA, 101 bp, Homo sapiens
ccattataggaaaccagtcactattacttttcacaagaaacaaggaaggcrtgagagacagcgaagaataatacagaagctgaattaaggcaagaaagacc

SEQ ID NO: 91 - DNA, 101 bp, Homo sapiens
tctatgaggtgaacagctagagttcagaagttgtctaacagtctacacgtrttcagtaacatagactttatcaaaagatgcactctcctcctctctaaacc

SEQ ID NO: 92 - DNA, 101 bp, Homo sapiens
gcagagagcagaacaaaggagggtgggacaggtgctggctttcagcttggrctgcttcaccacggtccctacctacactccctccccagggagcctccctg

SEQ ID NO: 93 - DNA, 101 bp, Homo sapiens
tcggcatcatctcaaatgacataaacaaaaatgtattttgtggtttttaartccagtcaccattaataattcctacctttcttttcaggttttcagtaaaa

SEQ ID NO: 94 - DNA, 101 bp, Homo sapiens
caaaacaaaacaaaataaaaagtaagaaacaagtcaacctttattataagytcatctcaaggtgtttgtggtgcaagaaattacagtggttcagatttaca

SEQ ID NO: 95 - DNA, 101 bp, Homo sapiens
tagcattctcttactggtacttgacttctattttgtacttacttttattgkttacctgactcttctaatgctgttctacatcaacgtaacaaccagtctat

SEQ ID NO: 96 - DNA, 101 bp, Homo sapiens
acagaataattcccatcaggaattgtggtgatatggaggtttattctaccstagcttgattaaaagtattgccagggatattcactatataaaatactgat

SEQ ID NO: 97 - DNA, 101 bp, Homo sapiens
agaaaaactgagaatatcctcatataaatctcattcttgatttaattttcyacttgtgcaaatcatattttccaaccatctcaaatatgtcaccgagtctt

SEQ ID NO: 98 - DNA, 101 bp, Homo sapiens
ccagtggccaaggtgtcatgctgcccatcactcactcactcgctaagtccygatcatcttttatgaagagggaaaaaataatagagtagtgtgataagtgc

SEQ ID NO: 99 - DNA, 101 bp, Homo sapiens
ttattaggcaaccttcagaagcttgcttagggccaggggactactttgcartacaaataagcattttctgtcccttagcagaatgcccacggtagcccccc

SEQ ID NO: 100 - DNA, 101 bp, Homo sapiens
tggaattcatggcccctgaagcgtctcacacttctccaacctttggatttycatgggctttgtttcgtgggcatgacagaatgtgctgggtgtaactgcta

SEQ ID NO: 101 - DNA, 101 bp, Homo sapiens
tgaagctgtcactgctgcaggcccccccttagcgcacagaggacaatcctyaccaacacgccaccaaccactccaatggcaattcctattcccaaggctga

SEQ ID NO: 102 - DNA, 101 bp, Homo sapiens
gagggaagagagggggaaaaaatgttgcagttaaatgaagtcaagggctayacaaagcaaggccacgaagcaagccagacaatgctcccaatgtgtcctta

SEQ ID NO: 103 - DNA, 101 bp, Homo sapiens
tcatttgaatagaaagagcttttatttaaaatagtcttgtaacctagctgsatttgtgatagggccttagtctttgctctggcaagtttgacttgatttaa

SEQ ID NO: 104 - DNA, 101 bp, Homo sapiens
caggcctgggaacttgaaggtctatggagccaccaaaccagttgtgaacayctatcctgggattcttgttgcatgaaataaacccatctttgtctacacaa

SEQ ID NO: 105 - DNA, 101 bp, Homo sapiens
ctctctactgtgttccacagcatgctttatttccccttttcaaagcacttmtaccactgtaatggattatcctctttgtttgcctgtctttcccatgagat

SEQ ID NO: 106 - DNA, 101 bp, Homo sapiens
gaaaagaatatcgactactttaagaatcacaaaatcactcactcagtatcraactgaaaaatcagagagacgcctaaagaaagagatgctttaatttttta

SEQ ID NO: 107 - DNA, 101 bp, Homo sapiens
gtatgtctatttaataaaaacaacttggcaatcagaattttgtgataaaawtgtctgcttcttggatacttgctctagtagttacaaaggctgggagagcg

SEQ ID NO: 108 - DNA, 101 bp, Homo sapiens
aatctgacttctaatatccaaactgtagagaatttaaaagattgaacgacyctcaaggaaaagaaaaaaaagcaataccagactcccattattaagagata

SEQ ID NO: 109 - DNA, 101 bp, Homo sapiens
gaaatcaaccgtttgattctcaatttcatactgtgccatacaatcaattcyttttagtcagactgtctctagatttacttctgagccatagtaaaatgagg

SEQ ID NO: 110 - DNA, 101 bp, Homo sapiens
gtttgaagggtgattttttttcctatctaaggttaattccattcatgttcrttttaattagtttcattttagaatatgttcttatgctcttgttctaaaaa

SEQ ID NO: 111 - DNA, 101 bp, Homo sapiens
aatagttctctacatcagaaatcaagtttattggagacaaattcaagtacmttacctacagcctcagcatgacaaactcactttatacttacagcaattta

SEQ ID NO: 112 - DNA, 101 bp, Homo sapiens
gttggtgaaatcatgtacatgtgaattattctagtattctagtcctgtccrtattcgatcagagaaattctaataccctaacagcagaataaaaaaggaaa

SEQ ID NO: 113 - DNA, 101 bp, Homo sapiens
cttgtaggtagtaaaaagttgtcttatttttattatctgataatatttgtstttgaactgaagtgcttattccattcatatttaatgcattattgttaaga

SEQ ID NO: 114 - DNA, 101 bp, Homo sapiens
ctaggaaataaaaacaaccaaccaaagaacagataactcgtgaaacagaakaaggattgacacagcaataatgtaaatatgaatgcaataaaataattcaa

SEQ ID NO: 115 - DNA, 101 bp, Homo sapiens
ggagttgagaagaggaggaagaataatgggaggagacaggacctttttcarcttgacaaataggtatagctacttctcatacgttttttctccctccaggt

SEQ ID NO: 116 - DNA, 101 bp, Homo sapiens
tacattaccacaatgtatttgattagtttaacttttattttgacttctccrttaatttcattggaacattaagatattttatagcttatcattggctatcc

SEQ ID NO: 117 - DNA, 101 bp, Homo sapiens
attctttgggaattagagtttgaaaggactccattactgtatcctccttcyggtagctttcaggatgtgttgtgattgtgagctgttatttttcaatgcta

SEQ ID NO: 118 - DNA, 101 bp, Homo sapiens
cacataaacagtgatttgcagcagtgcctgacaacatgttaaatatgagartgtaaatgtcaataacttttcaaatcatgctgagaatttcatcttggtca

SEQ ID NO: 119 - DNA, 101 bp, Homo sapiens
ttatctggagtaaagagaccttctgggatttcatcagcctcctgtccatcmagaggtatgttttgctttcccatcagaatcaagatttcaaacagagattt

SEQ ID NO: 120 - DNA, 101 bp, Homo sapiens
agagtttgctctatcagttgttttcaaccttgagaacatgttggaatctcytggggcctaggcctcattcctggagagcaggcttcagctgttgatgtgca

SEQ ID NO: 121 - DNA, 101 bp, Homo sapiens
aagattttaagtgcatagaaaattacattaaaaattttaaattgtatattwatcacatacctcgatggaaaatattttttttcaaaaatccagcacacaga

SEQ ID NO: 122 - DNA, 101 bp, Homo sapiens
tttttttcggtgcttttcaaattggatactttttaatttatctaatttttwaaatctcagttctttcttctgccaagtcagtgctactgattaacccattc

SEQ ID NO: 123 - DNA, 101 bp, Homo sapiens
gatgtaggtaaagtacgcagcatgccctaaaattttcataaacattgttcragtctttatcaaaatgaatatggcataatctgagatgaacagcagacaag

SEQ ID NO: 124 - DNA, 101 bp, Homo sapiens
tgctgtggaacagtgccacagcagcaggctgtgtggactgaatgcttagaygaatcattatttatttttagacctggtttctacatatttcatgattaaaa

SEQ ID NO: 125 - DNA, 101 bp, Homo sapiens
gccagtgtgttaatcccttacagaccaattgacattagaatgataacggtyggaaatggtttattgggttactcacagaggtacttacatctaaaaggggg

SEQ ID NO: 126 - DNA, 101 bp, Homo sapiens
cctataagatgaaaaaaaaaaaaaccaggtacttcatgtggcaactgtaartattccaattagataagatgtttacactcagcattgtcttatagtacata

SEQ ID NO: 127 - DNA, 101 bp, Homo sapiens
gggaagccactttgtctcatgtcccaacatcacagtacttaaggtctacamatctctagcaacagtcagactggaacatgctgcaggacaggatggcttca

SEQ ID NO: 128 - DNA, 101 bp, Homo sapiens
gaacccatctccaattcaacccaatctttcaatcagcaatgctctgctaartaataaatatcggaaacagctaaaggtagcataaagagtagcaagttaag

SEQ ID NO: 129 - DNA, 101 bp, Homo sapiens
taagatagatgtataaacccaaacccaaagtctctgcgtgtggtgactaarcacaagacacggctgactcatgcgccttcacagaaatgaggcctggtgtt

SEQ ID NO: 130 - DNA, 101 bp, Homo sapiens
ccccagaaggttatgcaggtacaggtcctgactgctagggtcaatatacawctcctgataacctttagatccaggacactggaggaaatcctacactctgg

SEQ ID NO: 131 - DNA, 101 bp, Homo sapiens
ctggggttgctctgtatggtgacaactctggtgcttttctatgtgagggaytaaaaaaacctgagtaacagagtgtccaaagtcgggtgtttgtatctaat

SEQ ID NO: 132 - DNA, 101 bp, Homo sapiens
gtttggtaggaatgtgcagagtctgggtgccatcactgcatgttattgtcycttgccatatgctaccttttacaaagatagctgtctcctgccatcaatag

SEQ ID NO: 133 - DNA, 101 bp, Homo sapiens
gcagccttgcagtggcctttgctgctaagatagaatcagagtcctttgcayggcatatgaagccccatggcctggccctcacttgcctttcaagcctcatt

SEQ ID NO: 134 - DNA, 101 bp, Homo sapiens
tgaagccccatggcctggccctcacttgcctttcaagcctcatttttgtcrttgcctacctcaaaattcacattgcaataaggagttgcgtacagttctgc

SEQ ID NO: 135 - DNA, 101 bp, Homo sapiens
ttccctgttttctttctctctctctccttctccacttcccacttgttaccrgtagctgacaattactcaacagcagaaagaggtgaagcaggcagtgtggg

SEQ ID NO: 136 - DNA, 101 bp, Homo sapiens
ctacctgcagcgccacttttactcaagagaagaaaattaaattttaagtamttcatattaagcaagcaaatcaaggattttcagctggtttagtgattctc

SEQ ID NO: 137 - DNA, 101 bp, Homo sapiens
atgtaagatggggcatctgagtgggtctcagaagaggttataaattcttgyaggtgagaagagagtaagggaatgctacgcatctctggtgtggtctggga

SEQ ID NO: 138 - DNA, 101 bp, Homo sapiens
tgacctgcagatagtggctctaggcaaagccaaagcaaaattaaccatgamgccttgagtttggccaaattgaattatttggctctgcagtatccaggaag

SEQ ID NO: 139 - DNA, 101 bp, Homo sapiens
attcataaaatgatgtaatatctatgtagcagggttgttgtaagcattagygctgatacatgtagaccacctattactatgcataggacagtcttatttta

SEQ ID NO: 140 - DNA, 101 bp, Homo sapiens
atacatatgcaaagaaatagcatggtttacatataaagcaattaatgtctragaggcaaattaatgaatatctagtagcagggcaaaaattgaaagtcaag

SEQ ID NO: 141 - DNA, 101 bp, Homo sapiens
aatatagtagcacttataaagcacctacagcataccagagccttattcgaragcagtaaggatacaatgaagaacaaaatataatttcatccttaacatag

SEQ ID NO: 142 - DNA, 101 bp, Homo sapiens
ggcgtaatttatcctggaagtataatggatagagtcctggagatgttatcrtaaaactctggttattcctcctactagtcataaagaaattttggaaagat

SEQ ID NO: 143 - DNA, 101 bp, Homo sapiens
tttactagtaaataaaattctagatattattttactagcagaaaatgaaaygttaaaagactatatacttgattatatattttcattcctattattttaat

SEQ ID NO: 144 - DNA, 101 bp, Homo sapiens
taagaagcttttctaatttgaaggaaaacggcctctcgttgtgtcttcacwttgaagtttctttgtgactctaatcccgagtcctggtagcatcatgtatt

SEQ ID NO: 145 - DNA, 101 bp, Homo sapiens
cagaataaacagatgtgtcagaggaagtgttgtgggaatgtgaagtagttyccatgcctggagtatattgggtatgtatgttgcaaaaattgtgtgtgtgt

SEQ ID NO: 146 - DNA, 101 bp, Homo sapiens
gctcctgtgtctggggaaggagaggcctgatgggtgggagctgtgcccagrtccgagccagagaaaagcagaaaggttttctattttctctattctacttg

SEQ ID NO: 147 - DNA, 101 bp, Homo sapiens
gacttaaaaggacacattaagacatcatgaatcaaaaggaggagacagaaycacaagtgtaggagcagggagtgtcgcctacacaaaaccacatctagaaa

SEQ ID NO: 148 - DNA, 101 bp, Homo sapiens
taaatggaaattctaacaattaaactttctccacggcttccgatcacttayctgtttgttctgactcctgaagagccctctgtactccttccagacatctc

SEQ ID NO: 149 - DNA, 101 bp, Homo sapiens
tttgcgcacccatgtctgctttaggcaggtggagtgacgcaatagttacgrgcaatggaatgtaataaaaagagcagagagattctaacaccagactcatc

SEQ ID NO: 150 - DNA, 101 bp, Homo sapiens
aggtttcgtcaggtgtggggggctttagaacagcttctctgatgtaggacyctggaatccagttctggagaaacattgcctaaaatgactaaacgtttcaa

SEQ ID NO: 151 - DNA, 101 bp, Homo sapiens
cattagcagcaccatgcctctcctcagagcatgaattttcctatttatgcrgagaaaaacaatagacccttttcaaatggtacctaaaacaaagactagca

SEQ ID NO: 152 - DNA, 101 bp, Homo sapiens
acacacacacacacacacacacacacgcctgcaagatttccactcttcacygactgtatcagcccagcctcatctccttccacggcagggcccttggaacc

SEQ ID NO: 153 - DNA, 101 bp, Homo sapiens
ggtcacgtggagagccagggattgctactcctctgggatgtagagtgttgytctagtctacatgattgcgactggccatcagcatcacatccatgtcctag

SEQ ID NO: 154 - DNA, 101 bp, Homo sapiens
ctggagatgcccccatctactcaagatgattacttttcctcctgaccacakcttttggttccaaaatgtattacactgtttaaatgcttttacccttgcca

SEQ ID NO: 155 - DNA, 101 bp, Homo sapiens
atgcctggctgacaacatgttaatttaatatattaatatagtgctattgaygttattgattgacatattctttttggaaattcatctgttgatatactcag

SEQ ID NO: 156 - DNA, 101 bp, Homo sapiens
aggattgcgttacaggctgttgtgaagacaaggatgatgaagaaatgaackgttctgaattttcttctaaataaataaatgctaaataaatgctaactaaa

SEQ ID NO: 157 - DNA, 101 bp, Homo sapiens
ctctgcagaagaatgtatgcattcatggagtgtctttgctaaaagctctgktctcaaagccccaaatataaaatttacataaaacttgaaccactgaagca

SEQ ID NO: 158 - DNA, 101 bp, Homo sapiens
gacactagagctactgtgggccatgaagaggatatttttgtaggagacccytggaagaaagcacatcaggcacccatggttgcaagtctcaggaggtccca

SEQ ID NO: 159 - DNA, 101 bp, Homo sapiens
taattaaaaccaagtcttacaattttatatttactttgtttatacagataycacctcattcttaagtttcataagcatatttttaaaaatgtgggaaaaca

SEQ ID NO: 160 - DNA, 101 bp, Homo sapiens
tgctcaccagtatctctgttccttctcttcatttctgacacacagctagawgacacttaccagctttcttgcagtgagctggagccatgaaatgtggatgg

SEQ ID NO: 161 - DNA, 101 bp, Homo sapiens
ccaactccagaggtaaaagcgtgaagcagctataatcaaatccatccataracaaatccagccagcatttacccctggcaagaacctccaagtctacgacc

SEQ ID NO: 162 - DNA, 101 bp, Homo sapiens
tcgttcagtctaccctccatgataccttatcacacaattccaaatcatacyttcttggcattgaggtcctatagcattccaagtctctgtcactattaacg

SEQ ID NO: 163 - DNA, 101 bp, Homo sapiens
ttagacctctggcagtctccttaacccattcagaagatgaagtccagccaraggaaagtagaagctcttccaccagagccactggtaagactagacagggt

SEQ ID NO: 164 - DNA, 101 bp, Homo sapiens
tatgagtaaagaaaacagtgacttagaaaagccaaatgacttgcccaaggrtcatttacctatgaatgtcaaggcagggccagaagcccagtctcctggga

SEQ ID NO: 165 - DNA, 101 bp, Homo sapiens
aggtgtggtggggagaaaacaacggcatctttcacaaattactaccttgaygtgagtggctaaaaaaaaaaaaaatcagggttagttttgaagggactcaa

SEQ ID NO: 166 - DNA, 101 bp, Homo sapiens
ttataagacaagtaagacatgccccctgcactagaggaattcacaggagaracagtctgattttgatttagtatgatgggccgatgcacttcaagagttac

SEQ ID NO: 167 - DNA, 101 bp, Homo sapiens
attactgggtgggcaacatgaccttcatccaggctcctcactgttagtgcygcattttaatactgctgtgagaagcagagtgctacagggacagtgctcca

SEQ ID NO: 168 - DNA, 101 bp, Homo sapiens
ttacaatagtcactctagagggacaacatgtgatagtcagcagtacctccratagaaacaagtgacatccattgcccctgctcccagtggctcagcttgtc

SEQ ID NO: 169 - DNA, 101 bp, Homo sapiens
ttcactcagccaggcactattcaatcgaaaatgtccctgatagtcggagawctcatgccagttgcctctcaagccactggctgtcttgaagaggatggcct

SEQ ID NO: 170 - DNA, 101 bp, Homo sapiens
ttgccattaatccagattaggtcatggactaatgccattatcacaggagtrgattagttattataggcttgcaggctcccttttctctctgtctcttgcac

SEQ ID NO: 171 - DNA, 101 bp, Homo sapiens
agttacaaaaatttggcaaaattgtgttagtgtccaagaactttatggaaygcagatcttaagagcaatgaactaggatatctggcaggaaaaaatatctg

SEQ ID NO: 172 - DNA, 101 bp, Homo sapiens
aaaactgagctattaatatgtgaaagcgctatgatctaccactcagcatascacgaaagttgtcatagttactacacccatgaaacagtggagtacttcat

SEQ ID NO: 173 - DNA, 101 bp, Homo sapiens
gcactttccccaaagtctcaaatccagttagtgcagagctgggaaccaaasactcctggcaccaagtccccagctgccttcctctgaagcaaagattcctc

SEQ ID NO: 174 - DNA, 101 bp, Homo sapiens
agagttaaatacagagagtataataggtggtggaacacagagatcatacartgttaaccccagaacaagagggctgtaccttgagtggaaatatcaagaat

SEQ ID NO: 175 - DNA, 101 bp, Homo sapiens
ctaagaatttgctttctagatgctgtccatgaaaaaggcaaactggatatrgagtaccacatgattcaaaactggggattttgttcttaaatagctaagtg

SEQ ID NO: 176 - DNA, 101 bp, Homo sapiens
taaaatcaggtaatatgtggccatgttcttccctgtatgcctgtattcttycttaaatgttttctaagaccatgttttacaaactttaagtacatgtgaat

SEQ ID NO: 177 - DNA, 101 bp, Homo sapiens
aaatgggtgggaaaaagagcaaaacttgttagaaaaactacttgaaataaygacaggcagtagaaagatttttcagtctccaaccctaggattctagagcc

SEQ ID NO: 178 - DNA, 101 bp, Homo sapiens
accagttttcacagctgaatatttattctataaaaacttcccagattgtayggtttagatacagttcaaactactgaatgaaaaggtaggtcccacagatg

SEQ ID NO: 179 - DNA, 101 bp, Homo sapiens
cttctgtcaacataaggaaaatatgatctattgacaaataaactgatttamattaagtgagtgctgcttcgtgttagaccatcacagaatggggtagggac

SEQ ID NO: 180 - DNA, 101 bp, Homo sapiens
atactgaagatcaacatatatctgctctgagttcatagggccaagtaaaayatcattcttcttgatgtttcctcagaaatatgtttttgcccttggggaga

SEQ ID NO: 181 - DNA, 101 bp, Homo sapiens
ttcttctcttaggtccccacacacatactatttgtggtatcaattcattcwcattgggtttactaaattattatttgaagcatgatatattttcaaaaaag

SEQ ID NO: 182 - DNA, 101 bp, Homo sapiens
agtctttctggagaaccatgacattttcaaccccagcagtgtccatacaamatgactgaactcttatgttttgtgacagaatacacacttacatagaattc

SEQ ID NO: 183 - DNA, 101 bp, Homo sapiens
acctggattactattttgaccattaatattggtttggtaatatggttttcytgatatggttgtgctaatccttttatgattatttttgtgtggattgcctc

SEQ ID NO: 184 - DNA, 101 bp, Homo sapiens
attgtgttcttgataataaaaatgtaatcataagcatagtgctttcctgasttatatgaatggttctagtgaattattgaacctgaatagaggtgtggaaa

SEQ ID NO: 185 - DNA, 101 bp, Homo sapiens
tttagcctcatttgtatttatttctgactgccttttatattttatttacaraaagtgcatagttgagaatataagctctggtgaacaggcttatattcaaa

SEQ ID NO: 186 - DNA, 101 bp, Homo sapiens
acttccaacttccagagtttacacacttaaccaagtctgtcttgcttcacytttaaccttaacaacatttattgactaaaattacacaaacataaaaaagg

SEQ ID NO: 187 - DNA, 101 bp, Homo sapiens
tataagtgtgagccactgcacctggctgctttcagctttatttttcctaayttaactttcaggtatcatcatctttttcctcccaagctttcaaatttcta

SEQ ID NO: 188 - DNA, 101 bp, Homo sapiens
ttttaaatgatgacgcgattagatttattggttaaaaaaagttcacactasatcgttaaatttaaaatgcaggttataagatggtaatttgacaatatttt

SEQ ID NO: 189 - DNA, 101 bp, Homo sapiens
tataccacaagactaaaaaatccataaaatgtcatattgattttcaacgcrtctctttccttctttaggagatattttgcacatattttatatgggtcaat

SEQ ID NO: 190 - DNA, 101 bp, Homo sapiens
attgagtaggatgaaggaattcccagctaacagcctttatcttctcatatrgttgatctactaggaatgaaaggcatcaagaaaactgggagtttcaggaa

SEQ ID NO: 191 - DNA, 101 bp, Homo sapiens
acataaagtactttgactaaagaataagagtaggaggtggaaggagtcttyactttgagtattggagacttgctgctagcccagagtacagtcacagctac

SEQ ID NO: 192 - DNA, 101 bp, Homo sapiens
ttctttccctttataccgtgggggtgagcagaagcaagacaagttactggkaaggagtaagaagcacaaatgctgaaaagacactgaaagggtgaaggtta

SEQ ID NO: 193 - DNA, 101 bp, Homo sapiens
caattacttggaaatcatagtattaaatcagtctcgtgaaggactgaatamttggatttcttttccaaggtacgaataatttaaatttgctcagaaagatt

SEQ ID NO: 194 - DNA, 101 bp, Homo sapiens
gctcctccttgccagcaagctagtgggtgatatagctccaaaacctcattkgagagactgcatcctaggaacacttctatcaccaactgtgttaggtcaga

SEQ ID NO: 195 - DNA, 101 bp, Homo sapiens
aagtttgtgtccttttcctgggggccaagcacgttcaatgactagtgaaayaggagtacaaaggctataaagaccagcgccccttgctgtacgtggggaat

SEQ ID NO: 196 - DNA, 101 bp, Homo sapiens
gagaatcgtgcctgcttccactggaactccaagatcatcgagggaatacamacagaggtgatgggctctggtgaggatccttaagcctaaatccctttcaa

SEQ ID NO: 197 - DNA, 101 bp, Homo sapiens
gacattgttcaaatgatattgagagaatagaaatccatacacactatcttyctcattttcctgttaccaactggtaagtctccctgctcctcagcctttct

SEQ ID NO: 198 - DNA, 101 bp, Homo sapiens
ctatctagtaggctgtgtgttataaatgatccctagaaacatagacattcygttgtgggagcacggaaaagggagtgatgatttctgagaagatatgactt

SEQ ID NO: 199 - DNA, 101 bp, Homo sapiens
tgttgtgggagcacggaaaagggagtgatgatttctgagaagatatgactygtaactttccaataacacttttctagaagggtctcatgttaaaataaata

SEQ ID NO: 200 - DNA, 101 bp, Homo sapiens
ctcctaaaaattcaagaaagtgtatggagcctcactcattgcacactggasttacttggctacacgtctgtctcccaaggtgaaggtgaacctggtgagag

SEQ ID NO: 201 - DNA, 101 bp, Homo sapiens
atgatgatttcagctgtagatatattgtttgtgatttctttggaacaggtwatcacagtttttttggaagatcaaaatttattgcctccctaaagttccaa

SEQ ID NO: 202 - DNA, 101 bp, Homo sapiens
gaagttagttcctccaataaaaatgatgcttgggaacatgttctaggtaartagctccaatggaatgaagttttctatgtcaatgtctgtccactaaagtc

SEQ ID NO: 203 - DNA, 101 bp, Homo sapiens
ataacaggaaaatcattaggaagtaatgataatttggacaagatgtaattrgactccacaatgagtggctgaggttagggtagggtttgagagaggaatgg

SEQ ID NO: 204 - DNA, 101 bp, Homo sapiens
ggtaaagtaaattgatcactaagtttcagagaaagatgagccctaaagaaytgagctaatgacttcatctctactgaggagcttcccatggctaggaagag

SEQ ID NO: 205 - DNA, 101 bp, Homo sapiens
atccatgtaattgatgtgggctattggtcatggtggaaaaggtaagaggamttatgaatgggaatgtactggtgaggaaaaataatgtattggccagataa

SEQ ID NO: 206 - DNA, 101 bp, Homo sapiens
agcaattgttaaaggactagatcaccaccagatcagtactagaagagagcytgagggggttctttgaatggaaatgaaagaatgatactaccacaaaagaa

SEQ ID NO: 207 - DNA, 101 bp, Homo sapiens
agaactctctagcctcatatattaaagacattcacctgtaaccttgtcatkgttcatatacacaaagtagggggttatattttacgtaaagctatattatg

SEQ ID NO: 208 - DNA, 101 bp, Homo sapiens
tctctattagactttgaggactaggacttggagatacttttgaaaaggatytgatctatatacagagaaaagaagctatgtaaaggaaaaggaaatactga

SEQ ID NO: 209 - DNA, 101 bp, Homo sapiens
gtgagtttaaaatataaatagaatgatctgttcaactttataatgctgcaragaaatatcagtaactgtttagtcagcgatgcaatttatatagataaatt

SEQ ID NO: 210 - DNA, 101 bp, Homo sapiens
ttttcttttaatagattttttgtgtgtgtgtggaaaccagatcagcaaagygctgtaactatggcctaccatggagacctggaaattgctgtactaagcag

SEQ ID NO: 211 - DNA, 101 bp, Homo sapiens
ctgtagaccgagtgaaaataaaattgccctaaccaatgtaatgggcataayccaatctgttaagggcctaaatagaacaaaaaggcagaggaagggagaat

SEQ ID NO: 212 - DNA, 101 bp, Homo sapiens
ctaaaccagctctgacaggaatagagagccataaacaaacaaaaagctagygaacacagatccttaatggaagagaagccatataatgaataatttggacc

SEQ ID NO: 213 - DNA, 101 bp, Homo sapiens
ttacaaacttaagaggaaatggaaaacccaaacactgtgtggccagaaacmattaacacactctagcccagaatacacatcaggacagatttttctcctgt

SEQ ID NO: 214 - DNA, 101 bp, Homo sapiens
atcatatctcatgaggagctctgaaggaaataatgcatgtaaattcttacyatggtggctagaacactgaaggatttagtgaatggtgagcattattatta

SEQ ID NO: 215 - DNA, 101 bp, Homo sapiens
ccatctcctcaatggagatgaaagttcatgtagctagaagactcttttccyttgtttactctcctgcttttataaatagatcacacttagaagcttatcaa

SEQ ID NO: 216 - DNA, 101 bp, Homo sapiens
aattgaagactgatgtgagtgcatatctagatatagaggtcattgaaatayaagtgattattgatagaaatatgtgagctcaattctcttggatgtgtaat

SEQ ID NO: 217 - DNA, 101 bp, Homo sapiens
atatataaattggtccaaattaataatgtaatcacattctatacaaggaasatttaaccaaatagagctgccacaaattattcttggtggatgcaggtgtg

SEQ ID NO: 218 - DNA, 101 bp, Homo sapiens
atgcatttattatttttactttttttctgtatcacaaaacccagtaaaatygtttcagtgtaggggagttaaaatcttcaataataattgtacattcatct

SEQ ID NO: 219 - DNA, 101 bp, Homo sapiens
ccttttggtgagatgactgagaagtgtataaagatactttctaaagtttargtgacattcttgagttgggtacagatgcacttagagtgtgaaaattcttt

SEQ ID NO: 220 - DNA, 101 bp, Homo sapiens
aagtatcctctgattctagatttatttttatacacaagccttaaatctacrtaaaattatagtgtataaaacagaagaatggagtcaatttttatcttttc

SEQ ID NO: 221 - DNA, 101 bp, Homo sapiens
tttagaagagttcatttaagtggtggaaggaccctccttctttttactttrtgaatgcggtctctgggtatggggtctgatgtgtccattgtggagtggaa

SEQ ID NO: 222 - DNA, 101 bp, Homo sapiens
agactatgacccatctgggatggacacagaagccataaacataaggcagaktatctcttctccctttattctgacttttagtctaatactagtgcttcagt

SEQ ID NO: 223 - DNA, 101 bp, Homo sapiens
atttacaatatttgtttttatataaaataagtgtattacattttacttttrtcatatacagaactttttatattaaatatcatagttataatacaatatct

SEQ ID NO: 224 - DNA, 101 bp, Homo sapiens
aagttggactttaaggctaccagcatggggtcagctgggatccatggtaaragcctccaaaatgactccttcaatagaatagcagaatggcagataaagtt

SEQ ID NO: 225 - DNA, 101 bp, Homo sapiens
actaacagcacatcaactaggtgggggcagagaaaatcctctgtacttagrccaatgattctttagaccaagtgaagatgctggtcattcccaacatgagg

SEQ ID NO: 226 - DNA, 101 bp, Homo sapiens
cacgttttggggggatcatttcgtagataacactgctatagtcacttcacygtagctttttaggttctgtcactgcctggcttcctgtgggaatgtgcatt

SEQ ID NO: 227 - DNA, 101 bp, Homo sapiens
ttttggggaaacctcacttgctggcatggaactatgatttggggctaacgytgaaaaattgtgcttcaacacatgacaagaacatgagctgactatgtcta

SEQ ID NO: 228 - DNA, 101 bp, Homo sapiens
ttgtgctataaccattccagacttagaagcctagactctgttttggctagygggctttcccaatcactgtttatccattttactgctattggttttaggta

SEQ ID NO: 229 - DNA, 101 bp, Homo sapiens
aggcattcatggatctagacacaaatacattctttgcaaaacatgtcaccrtaagaaataagatgcttggagataagtagattaagacatcacaacaggca

SEQ ID NO: 230 - DNA, 101 bp, Homo sapiens
aaacatgtcaccataagaaataagatgcttggagataagtagattaagacwtcacaacaggcaggaatgttgtttttacttgaatgggctacgtacttaga

SEQ ID NO: 231 - DNA, 101 bp, Homo sapiens
ttagcagtgctgtatttaagagtggatcgcatatccatcattcagtccacrtttcaaagactgataaaatattgcccctgaagatttaagagatgctggtg

SEQ ID NO: 232 - DNA, 101 bp, Homo sapiens
aaaggcacggaagggttatcattgaacagtttagaccaattttgattcacycaagaccaggcacaccactgttctgaatcaaattggggtttagttcacaa

SEQ ID NO: 233 - DNA, 101 bp, Homo sapiens
aaaattccccaaagtgaatttttattggataattttttttaatgtgtcaaygatttgaagctcatggataatttgaaattacttatgatactttggcttta

SEQ ID NO: 234 - DNA, 101 bp, Homo sapiens
ggttgagatgtattgttaaagtttcttgactcctcttaagatattaaaatmtttcctggccatggtggtgcacatctatagctccagctactcaggaggct

SEQ ID NO: 235 - DNA, 101 bp, Homo sapiens
gaagtcaaggaaagtagccagactcctgatgttttctacctgtagactgtwagagactcccatgctgtgcaatgacattcattagactttttgtagtttca

SEQ ID NO: 236 - DNA, 101 bp, Homo sapiens
actgtaagagactcccatgctgtgcaatgacattcattagactttttgtartttcaactggacaaccctgtaacccatgcagagaacacctcatacaagat

SEQ ID NO: 237 - DNA, 101 bp, Homo sapiens
caaacatgaatgggtttggctatttacatgcataaaattcatcagataatwaccaacctcccccttatgttttaccatatagttaatgagaattattttca

SEQ ID NO: 238 - DNA, 101 bp, Homo sapiens
caagaaagaatgtagatatttagtctatatggcatggcactgcaatactgytgggtttaatgcagaagatcatctgactccttgcaatctcaagtttttct

SEQ ID NO: 239 - DNA, 101 bp, Homo sapiens
agtatagcaaccaaaaaacaatttgtgtcctttctcaaatcttaggataawttacattagcagaactaatataagaaccattgatttccttttttcctcca

SEQ ID NO: 240 - DNA, 101 bp, Homo sapiens
catgaatacacatatgacttcaaagatccatgatactgtcttataataaawcatttccctggattcactggtgctattttaaccatgagaggggtggcagg

SEQ ID NO: 241 - DNA, 101 bp, Homo sapiens
cagagcctacagatgtttctccgtggggataattccctggcaaataataawaccttgcacttttacactgcatttaacttttcaaagtgctctcatctcat

SEQ ID NO: 242 - DNA, 101 bp, Homo sapiens
attttaaaattattttgtctgtcctcagaacagcagaactcaaagttatgrtacagaggaggctcgtttgttacaatgcagggccatgctattgtactggg

SEQ ID NO: 243 - DNA, 101 bp, Homo sapiens
tgcaatctcaaagagctatgatgattttttaaaagtaaacacacttaaatytggtgtcagagaagaataattcttgctcaatgaaaagtctgtctttatat

SEQ ID NO: 244 - DNA, 101 bp, Homo sapiens
gatagctgcaaagaacaagtaaattagatggagtgatccctgcttctcacygtagccaagataagtcatgccttcgatttagggcagattaagtagaggtt

SEQ ID NO: 245 - DNA, 101 bp, Homo sapiens
taaaaatgtgttggcactctttggggagaaacaaagaaagagtgtttaccrtgacatttagcttcatatttccttttgccagttgccaaccaggtcattct

SEQ ID NO: 246 - DNA, 101 bp, Homo sapiens
atacttgtttctgatctgccttgggggtaactcaagataagcaaagataarcctctaattgattatgaacttattgaaagtcaatctgagagacagaagga

SEQ ID NO: 247 - DNA, 101 bp, Homo sapiens
atatacaattattttgcccaacaaatacaatggatatggtcttctaaatargcagatgtatatacaacaaaaactagaaacattattaattcatatcaaga

SEQ ID NO: 248 - DNA, 101 bp, Homo sapiens
cactcactgtgttcatgatgttggaacttaaatatagagcaagaggtctcyttatgctcattcttgctgacacttgctcttctctccagcacaccaaccac

SEQ ID NO: 249 - DNA, 101 bp, Homo sapiens
tttattacaaagcttcaaaatttataagcagtctatctctggaaagataawcaaaacccagcagtgatggtggcctatgagaaactggggacaaaggtggg

SEQ ID NO: 250 - DNA, 101 bp, Homo sapiens
ctttccctttggtttctttaatttcatacccaaggacttttgtatcacttrgttccaaggctttttcttgatcagcagatttaaaattcacataaccagcc

SEQ ID NO: 251 - DNA, 101 bp, Homo sapiens
gttttaaaattaaacaggtcacttgagaaaacaagttagatgtataagaamtattcattaaatgcaggaaacacaatttatgttgatatctgaaatagagg

SEQ ID NO: 252 - DNA, 101 bp, Homo sapiens
agagagacaaaaatagagatttgtttaaactatttaggtttgctcttactsactctaaaaatggttgtgaatttacacaatgtcatttgctatgctaaaat

SEQ ID NO: 253 - DNA, 101 bp, Homo sapiens
catatttcatcgtttctttttgaaatagagttattttgaaaatattaagtygctactctaatcttgaatgtctgtcagacctgagacagagctgggcacat

SEQ ID NO: 254 - DNA, 101 bp, Homo sapiens
gtttcttggctttctctattgctggctcaggattcagctttctcaggactsctaagtcagttacactcatccatctgctacccagattccaaaattttgtt

SEQ ID NO: 255 - DNA, 101 bp, Homo sapiens
ctatatttggctactgagcctaaagtattccaatgtagattcatgtgaaargttctacatatcagacaaacccaattaagaatgtgatagggatatagcat

SEQ ID NO: 256 - DNA, 101 bp, Homo sapiens
aagagtgacaaacttttgtaatggatccaagacagggagataaaagttgaraacaatcggtgcaacagagtaaaacaaaatgccgcatgatatatgttgaa

SEQ ID NO: 257 - DNA, 101 bp, Homo sapiens
aattactaactgagtacctattatgagccaggaacttttataggttcttaytttattgcactgaagaaaccagtctcagcattcacacggcttacaaccta

SEQ ID NO: 258 - DNA, 101 bp, Homo sapiens
tcaggtctttgtatagatttaatgacattagcaagaatattccagaaattrtgttatgcaaatgatatgacttggctgtatccccaccaaaatctcatgtt

SEQ ID NO: 259 - DNA, 101 bp, Homo sapiens
acttcacaattctactaatgtcattagatgcctggtgctttattataattyggtttagctgcactttcgtaatgttaggtattgacaatgtgaagattttg

SEQ ID NO: 260 - DNA, 101 bp, Homo sapiens
gtacatttgcagaaaggtttgaatggctcaatatctctgtgattaatattmcccaagagtcaccaatcagagtgaacttctgcttatgcaaggctgaaggt

SEQ ID NO: 261 - DNA, 101 bp, Homo sapiens
aaccaggataaatgatttgccatggtatcctatatgttatagctgtaagaytgacatccaggtttattgaaatctaatgttcttccttcacatcatactga

SEQ ID NO: 262 - DNA, 101 bp, Homo sapiens
tgttctagaagcaattgtccgaatctctaggagttttgagggaggtttttsctaatctgactaaatttgctgagattttattaatttggtctcagcttact

SEQ ID NO: 263 - DNA, 101 bp, Homo sapiens
taatgatttctggtgggtagcaatttttaacattatcatgtgtttttcagygataggagtgtatagcaaggaaattaagccagaaatagtgacttccactc

SEQ ID NO: 264 - DNA, 101 bp, Homo sapiens
ttctggcaggggcagagacagaatttgctacacatacccaaatattctctmtatacgttagggtggtgccaaagtcattgcagtctttgctgttactttta

SEQ ID NO: 265 - DNA, 101 bp, Homo sapiens
cttacacaatttattttcctcaaggaagagataatgcatttccagattgarataacaaattgaattttatgaagatccatcttgtattggatgtatctgaa

SEQ ID NO: 266 - DNA, 101 bp, Homo sapiens
tcagccattttctacatagagagtgatagaggaaagaaagcagcacaatgrtttgttaagcctgtattaaatgcctttaaacttttcaaccttgcagctta

SEQ ID NO: 267 - DNA, 101 bp, Homo sapiens
accaagggaggcagaagggtcaggacttagagaatcccgtaggccggtccragagagtctgagaagcaaagtttaagagctggggtagtattaattaataa

SEQ ID NO: 268 - DNA, 101 bp, Homo sapiens
ttctgaggcctttctccttggcttgtagaaggccatcttctttcgatgtcrtcatatggttttctcctgtatgtttctttgttctaatctcctctttttgt

SEQ ID NO: 269 - DNA, 101 bp, Homo sapiens
gctggatacagtttggcttggaaagaaaaagaaatagagcatcttctttayggtgaatttctatgttaagaaaaggacgttggaaattaatttaggaattc

SEQ ID NO: 270 - DNA, 101 bp, Homo sapiens
gagccccctacacacattcacagaataatgtcatgagggtcctcatatttyggagccacaggagcagaagcttcaagaagtaaaaggtaaaaggtgacaga

SEQ ID NO: 271 - DNA, 101 bp, Homo sapiens
cctgaggtcccctctttaaagctttgcaagcatttggagtcctccaacccraagataaaagatggtgaaaattaaaactacccccaagatgccatttttaa

SEQ ID NO: 272 - DNA, 101 bp, Homo sapiens
accttgtgttcctgcctatcttggggcaaaggagatattcgacatacttargacaagaaatgaaagggttcagatttaagcctgaggagcttagtgcttat

SEQ ID NO: 273 - DNA, 101 bp, Homo sapiens
aaccttattattaagctggggacacaatattatagatgtaaggagacagayttgccctactctctgttcatgccttttcaactgtttgggattctgacaca

SEQ ID NO: 274 - DNA, 101 bp, Homo sapiens
tttttggggaagttcaggagcatgctcttgaagaattgctgataaagtgtrtaattgtcccatgaccaccatcacatcccaggggagagccttatgtttgg

SEQ ID NO: 275 - DNA, 101 bp, Homo sapiens
atcctttgactagttttgggagacagtggggtggaatggatagagaatgarctttgaagtcagacctaaatttaaatcctggctcagccctttactccttg

SEQ ID NO: 276 - DNA, 101 bp, Homo sapiens
tgtttcatttaattttcacaactatgctgtagttaagtactgacatccttrtttttcagaagatgagatgaaagtttggggaggtgaattaacttggccaa

SEQ ID NO: 277 - DNA, 101 bp, Homo sapiens
ggatggacaggtagatggatggatatggatggaataagagaaggaatattktgacactgtacctaaaacaaggtaggagaaagcactggttttagagtcag

SEQ ID NO: 278 - DNA, 101 bp, Homo sapiens
ctcctatggccttggcatctgagaccacgaccgtcaatttactcatctacrgaatggaagaaaatcaggtaactctctccttctagctccgcagggtttaa

SEQ ID NO: 279 - DNA, 101 bp, Homo sapiens
tcagtctataaagattcacggggcagccagaaagagtaaaatagcattgtytgaaatggtgtgtttataaagatttacccatgaaatgtgagggaataaaa

SEQ ID NO: 280 - DNA, 101 bp, Homo sapiens
tcatcagttctaatgtacagaaaaatttgagaaccaatggagtaatggttmaaggcttgcactttgaatctagacagatcttagtttcaatcccggcttta

SEQ ID NO: 281 - DNA, 101 bp, Homo sapiens
aaaagacgactttggcagctatgtagagaatggatgagagggaggcatgcrcacaagtgtcagacaagaggctctttccagtgagcccaggtgaagggtag

SEQ ID NO: 282 - DNA, 101 bp, Homo sapiens
gggtttgttcatcctgatggacggcaccctctaacatctgttgactgcaaygattacctaaagttatggtcaaagccaaaccctacatcaaaaaatgagta

SEQ ID NO: 283 - DNA, 101 bp, Homo sapiens
caacatttaaaacttctgctccatgaaagctcaagcaaagaggatgtaaaraaaagctacagactgggaggatatacttgaaaaccacttatccactaaag

SEQ ID NO: 284 - DNA, 101 bp, Homo sapiens
catattaacatagagtatagatcatgttaacatcttctatttggaaacaaycattgtaatatttgagcctttattacaatcacatcccacttgtctcttta

SEQ ID NO: 285 - DNA, 101 bp, Homo sapiens
gaacttaaaatggaattttattgtatatgtgaataatacttcaataaatckaatactaggaaaaatataggcatataggaacaaatgttcagatcaacctc

SEQ ID NO: 286 - DNA, 101 bp, Homo sapiens
ccaggtgtggtggcggttgcctgtaatcccagaagaaaaaagggacattaygaatatagcagattttttcaatgttaagatgaaattataaataattatgc

SEQ ID NO: 287 - DNA, 101 bp, Homo sapiens
aatcctcttcatgaaggaccttcaagcctgtgactaggctgtcttgtttcyttccttgatttaagcttccccaggtgtaactaaatccctgtttcccccag

SEQ ID NO: 288 - DNA, 101 bp, Homo sapiens
tctctggaaaactgcaaatacataagactttttcgtatatgattccaagtktgctatggctgcctgtagcctttccaggggtgtgcgtccagtgaggacca

SEQ ID NO: 289 - DNA, 101 bp, Homo sapiens
gggaagttacaggcttacaggctgccatcaggaaaaactagctacttagasgtgaaagcaatgtctttggaacatggtaaatgaaaacgcaaatgaaagtt

SEQ ID NO: 290 - DNA, 101 bp, Homo sapiens
agcatgggttcaagctattggcaaaacaagccaggtgtaaattatggtagrattgaaatcgatagtgctttgaagtactggagtgcccagttcacatcagg

SEQ ID NO: 291 - DNA, 101 bp, Homo sapiens
tttcatctttccttgattattagcttttataagtgctgtggctgtcgatayatagttgcatttatgtagactgacgatgatttagcaaagagatttcaaat

SEQ ID NO: 292 - DNA, 101 bp, Homo sapiens
agcaaagtgagaaagggaaaaaaacaagtgttttgctgcctcctgtttgarttaatctcttctgacaactgctgatttgggtttgtgattcgatcttccat

SEQ ID NO: 293 - DNA, 101 bp, Homo sapiens
ataagaaggatttgaaaatgaaaagataacatggttgtagcctcgatgctkgatgaattgctcctgtgtagtactttataatgctttatttagttcaccca

SEQ ID NO: 294 - DNA, 101 bp, Homo sapiens
ttgcattctttttattttgtcaatattgttcactaattttcccaattctaytattttaccatggttctaagattttagaaacaaagctttcccagattatg

SEQ ID NO: 295 - DNA, 101 bp, Homo sapiens
tttggtgagcaattgtttcctggttaattcagagaaaatttaacaacctcyacttgtgctctcaaatcaatccttcttgatgtatttattattgtttttaa

SEQ ID NO: 296 - DNA, 101 bp, Homo sapiens
gctgtggaaaggccgagagctctctgcaatatctgttttcaggggcctacrtttttccagagaaagtgcgcaactaaatctgcttcatggctcctgcctct

SEQ ID NO: 297 - DNA, 101 bp, Homo sapiens
ccgctttattggttgctcaagccgcggcacggaattctgctttagaattcrtttggctccctggctccacccaaaggccatgagatcccccatgttcctat

SEQ ID NO: 298 - DNA, 101 bp, Homo sapiens
atatgtggaatatttttttaaaaggtcaaaatatacacaaaaatatacackgatagaaaataaaacagtagttaccagcaaagtggagaaggcagctagga

SEQ ID NO: 299 - DNA, 101 bp, Homo sapiens
ggatttagcacagtgttttaaagacaaatagaaggagatcatgtaacaggwtgccacgactttttaagatagaacatgagacttcaaagcaattttgcact

SEQ ID NO: 300 - DNA, 101 bp, Homo sapiens
agaaggagatcatgtaacaggatgccacgactttttaagatagaacatgakacttcaaagcaattttgcacttacagaaagtatttttgggccaggctcct

SEQ ID NO: 301 - DNA, 101 bp, Homo sapiens
aacagggatctgtgcagctcactctgcactggggctgtgcaattctctctstccagaactgggcacagcgtttctggtgttgattcttttgtttttaatgc

SEQ ID NO: 302 - DNA, 101 bp, Homo sapiens
agccacttccacaaggtctgggctgggggccaacatttgtaagcctttagygtggtgtcccttggagtaaatgtgcttgttttcaaagaacctcagacaca

SEQ ID NO: 303 - DNA, 101 bp, Homo sapiens
aacggagcactgggttcaacattcctgctgctcccatgctcagctcccagmaccactgaagaggtcaagctttaatccaaataccaacattctgcctctgc

SEQ ID NO: 304 - DNA, 101 bp, Homo sapiens
ccagctggtgattttctggtattctagaggtcacacaaacttttgtggacrtttataggtatgctgatagctgtaagagttttttcttttaattgtacaat

SEQ ID NO: 305 - DNA, 101 bp, Homo sapiens
tgagagctgttaaacgaatcatctatttccagctgtttgggcttttgctckcttaagttttgtttatctttcctctcccattccccatcctcctagtctct

SEQ ID NO: 306 - DNA, 79 bp, Homo sapiens
atctcagacttctacccttcaaaactgakagaaataagcgtttgctgtttaagctacccaatccatggtagtttggtat

SEQ ID NO: 307 - DNA, 101 bp, Homo sapiens
cgatcagtgatggacaaattttagttgaggttatcatatttgtatgtttgmaagctcatttaggatgccgtgagaagaaaggtggatggttagttcaagag

SEQ ID NO: 308 - DNA, 101 bp, Homo sapiens
gcaaagtttattcaattaaaacagtatttgggaaagatgaatcgagctgcrgtatttagtaagttgagaataggcaggatgagtaatgaggatgctgtggc

SEQ ID NO: 309 - DNA, 101 bp, Homo sapiens
agtgcttagtgaccttggacaacattagcaccttctaagtcctggaatccrccaagaaggaggaagggagatggtgctgaattcccctaaggcagggctca

SEQ ID NO: 310 - DNA, 101 bp, Homo sapiens
agctgggagtgaaatcgctggtgtttagctgaccctaagagaggatatggyctaaatgaaaatccatgcgatgggaagaatctgatccattttaagcattg

SEQ ID NO: 311 - DNA, 101 bp, Homo sapiens
ctaaattccttaggggatttatgaatggctccaggagatccaccattctcsgtaactatcaatgtgcatgtacatttttctagagagactttccatagctg

SEQ ID NO: 312 - DNA, 101 bp, Homo sapiens
agccttagaatgtctcccaacagaactctccaagcagctattatcaatcargaagttggtatttgaattagcacgtattaccatttcaatgctggactcat

SEQ ID NO: 313 - DNA, 101 bp, Homo sapiens
caaaagataaacaacttttaagaaatgtttctattaaaatagtgtatgtamatagtttcaaaagaagactacagttgagcttatgataaaaagtaatcaat

SEQ ID NO: 314 - DNA, 101 bp, Homo sapiens
tttagaataccaatattttttcttccaagtgtatcttctctcactatataycatcactacagcaagaaacgagtggtaatcaggtcacagttctacatgtg

SEQ ID NO: 315 - DNA, 101 bp, Homo sapiens
tcagaagttatgggtcttggtaaaattagagtgggactatagcatccacastgggacaaaagagatgatcatgttcccaaagaggcagggtgttgcagacc

SEQ ID NO: 316 - DNA, 101 bp, Homo sapiens
attggtaaatgatacaaccagaaatcaaaatacttcattcttttctttgayagtcgattgcttcttccccaaatggctacagcagtttttctggctcccat

SEQ ID NO: 317 - DNA, 101 bp, Homo sapiens
gtgaaataatgggttcgttctgtttgtgcttctcaaggtagaaaggtgccracactcatccagggagaagccccgggaagatttccctgtactgcatgagt

SEQ ID NO: 318 - DNA, 101 bp, Homo sapiens
ccaccaacaaatctctatctagaagtttttcactctaaccaattatgattrtttgttcttgctgctgtgaatactttataaaagtttcccctgttgcccct

SEQ ID NO: 319 - DNA, 101 bp, Homo sapiens
atggccagtgttttgggatttagggagggatgggagtagaggtggcaatayagaagtagcccaagggagatctctgtggtaatggaatgtctgtgttttga

SEQ ID NO: 320 - DNA, 101 bp, Homo sapiens
agagcagctctcctaggctgtcagttgattatagacctgtagatctaatgracatgataacagtagctgacatttgctgagtacatgccatttgctggcac

SEQ ID NO: 321 - DNA, 101 bp, Homo sapiens
gatattgagaaaaaaggagactaatgctctcagatatttaaactgcttcakcccaaacctggaagactgtttcatgggccattaatttatagaattcacag

SEQ ID NO: 322 - DNA, 101 bp, Homo sapiens
tgaagattttatatatgctgctttccatgaagaccttacttaatgttagartactagatacactggaagtggaagaggtggtcaaagagaaaactagggcg

SEQ ID NO: 323 - DNA, 101 bp, Homo sapiens
tcagaatcagctcaagaactggctccacagaagatagaaggcagcagaatyggttgcctcagatgtaactaacagaaactaacaaggttcttccagcaaaa

SEQ ID NO: 324 - DNA, 101 bp, Homo sapiens
ttatcatagcagttagggaaaatatattgatatattcccttcaagtaatgytacccaagtgctagccaagatatatctagtatgtgtgtgtgtgtgtgcgt

SEQ ID NO: 325 - DNA, 101 bp, Homo sapiens
aaaattctagaagtatgccagatctccagtcactattaatgaataataagrtaggagacaaaatatttgaagcaacagtgtactaaattatgtcacatatt

SEQ ID NO: 326 - DNA, 101 bp, Homo sapiens
ttatgtttagtcctacccaatttaaatttccaacatcaaactttctccacyttcctgatctctgaacggctctattgcaacaaaagctttcccagctactg

SEQ ID NO: 327 - DNA, 101 bp, Homo sapiens
ttatcatctataaaggttaataatattcatgctactcttctggtacataawcaattcccattacctttgtatcacgcctgttgtgatatcttttgaattct

SEQ ID NO: 328 - DNA, 101 bp, Homo sapiens
gtcaagcttattttggatgacacctgggcatccctgcagtctcacagactyggaatccctatattctcatctcaacctattacacagaaatggtgttgacc

SEQ ID NO: 329 - DNA, 101 bp, Homo sapiens
cctttgaaataatttaggaattgagtatctcctctttatcttttacatttraatatcttcacactttttaaaacaattttttacacgttttgaaatgttaa

SEQ ID NO: 330 - DNA, 101 bp, Homo sapiens
ggcatatatgaaaaagtgcataaagcgaaacaaataatttaaggaccaccrtttcattgtctgctctactattctattttaacataaaatgtttggaaaat

SEQ ID NO: 331 - DNA, 101 bp, Homo sapiens
ttctttcttcatgatgggaaatgattgatcaactcacacattctctgttaygtttcatgccaatgaagtaatatcctgtagagtcattttttaaattatgt

SEQ ID NO: 332 - DNA, 101 bp, Homo sapiens
gaaatatatctgttccacctaattcctccatgctggagattgtaaatctgygtgagaagagtgatacctccaggaattctttcccatcatggtgtgcatga

SEQ ID NO: 333 - DNA, 101 bp, Homo sapiens
cactgatgcatcagatatcattttaacaataaagaccaaagtaagatgatyggttttaacttatagattcaatacggtgaaacagaactacaactgcattg

SEQ ID NO: 334 - DNA, 101 bp, Homo sapiens
tcactgattcagtgataaattattattcactcaacaaatatgtattgaacrtctcccaaattaaaactgccatgaaagagttagaacgtagcatctgtaga

SEQ ID NO: 335 - DNA, 101 bp, Homo sapiens
aatgaaatggtagcccaagcttgaataaagagaacatttatttgagtattyagtcctgggagagcctggctattgtacggccatgttgctgctctgtgagt

SEQ ID NO: 336 - DNA, 101 bp, Homo sapiens
ataatagttgtttccaaggagttgaatttttgagtacttttctgcatttcrgtatggttttttttttttttcctaatgtttcctaatgaatctagtctggg

SEQ ID NO: 337 - DNA, 101 bp, Homo sapiens
ttaatagcacatgaaatcaggtaagttgtgaagcttaagtcacagttttarttcttccatgacagtgaaaaccttgcaacttttcatcataatggaaacta

SEQ ID NO: 338 - DNA, 101 bp, Homo sapiens
tgaaaccaatactgagccagccagtgactagattagcacttcctttttacrttaggaacaattgatctctggtaactcacagcatttaacacacgatagca

SEQ ID NO: 339 - DNA, 101 bp, Homo sapiens
aatataaagattaatatatgtttgatccttctataaacacacaatttggtmgcccaaaaaatatcacaaagctatccagaggcagtgcagtacaatggttc

SEQ ID NO: 340 - DNA, 101 bp, Homo sapiens
gggtcctttgtactcttggcttctccgtggcctgccctgctcttcctaagktctctattccctacctacagaaacagcaggcaaggccccatctctctcat

SEQ ID NO: 341 - DNA, 101 bp, Homo sapiens
gcttccatgctggggcagtacaacagacaaaaagccaaccaaattaagagmtccaaagtccaattctaaaaattcctgatttcttagctaatgatagttgc

SEQ ID NO: 342 - DNA, 101 bp, Homo sapiens
gtctcctagttcctacttacgggctttccctatccttctatcccatacaaytaaagttcaccactgttgttataattcattggccaatgggaagtcctggc

SEQ ID NO: 343 - DNA, 101 bp, Homo sapiens
ctgtttatccctgtcttccctgattatttatttaattctctttaagaactstagcgaatttgtctgacatggttaccctctttcaaagggaaagactctcc

SEQ ID NO: 344 - DNA, 101 bp, Homo sapiens
ttttggtatccatagaaggtcctggaaccaattcctgagggatgattgtaygtgttatttttccctctggaaatgcacaaggctttgaaactttttcactt

SEQ ID NO: 345 - DNA, 101 bp, Homo sapiens
agtaagttcatcttaactatgcataggttaagtgtccttctcttgtgaagytattattaaagaaaatcagttccaaatatgtaggtgtgaaagaaaaatag

SEQ ID NO: 346 - DNA, 101 bp, Homo sapiens
ggttcagaaaaggagggggtgtttcaaaggagaaaacacagaggacagaaytggtgtaaaatgtaagaatgggacagatagacatatttcagaaagtagga

SEQ ID NO: 347 - DNA, 101 bp, Homo sapiens
aggataagcagatgaaaataaacacagaaaggttaatctcaaagtatcaaygtgcttcccaaaatgtattcctataaggggcactagttgacattctgtgt

SEQ ID NO: 348 - DNA, 101 bp, Homo sapiens
agattagcatttatccaaagtaagagcaggaaaacataagaagcttacagrattcatcaaataatctaattcagctacaagtacctttggctaggaagata

SEQ ID NO: 349 - DNA, 101 bp, Homo sapiens
taaagtaagtaattttaagtaaagtgagatagataaagtaaaactcatgarcagcaaagaacttgacaaggggacagtaaatgtttggctgtttatccagc

SEQ ID NO: 350 - DNA, 101 bp, Homo sapiens
tgcatatttgggaagaaagactaagttaccatctgttttgtttactgcttygtctcatgacaccaattagctggataagaaaaaggaatttgaggaatgca

SEQ ID NO: 351 - DNA, 101 bp, Homo sapiens
actaaaggtgaagtggtagaaggaacatttattgattaatttttgcctcaygtagttttagtctcaccatataagtctttccagttccccaagttctttcc

SEQ ID NO: 352 - DNA, 101 bp, Homo sapiens
gatgagagagtagtgtctgaccccataacaaatatctgctaaataataaarccctgatttaaatgaatatttcccagtttaaaattttttctgcctttcca

SEQ ID NO: 353 - DNA, 101 bp, Homo sapiens
agatgatttagcattactatttctgtgagttcaaacaatgtaatcaagaaycttccgtttccctcttttatctatgctttccttttgatgactatgcatga

SEQ ID NO: 354 - DNA, 101 bp, Homo sapiens
ttggatttataaatgttctttattcattgcataaacatcacaatattcctraattatatgagttaatacaattttttaaagttcaactaattttcaagaaa

SEQ ID NO: 355 - DNA, 101 bp, Homo sapiens
cttaaaaaaaaacaaatatatcattttcaagctcaacagatagatatggtmtttcgctcaattaacttaatcttataatactggaattcttaagaagcgcg

SEQ ID NO: 356 - DNA, 101 bp, Homo sapiens
ccaggactttgtttcagtggtttaaaattcttttcagaactttggctagayttcagagagagaacacaaaacaagcaaataattgtttttacacagatggg

SEQ ID NO: 357 - DNA, 101 bp, Homo sapiens
tttttgcattgagatcatttgcttcacacatacaactcataaacattgctsattgggagtctgatagaaagctttacaattcagttgtagatcgatctcta

SEQ ID NO: 358 - DNA, 101 bp, Homo sapiens
tagttaaaatgaaagtgggccaactgttttggaactacggtaagatttggyatgaggctccaactttgacatgtggtagtcccctcccctactctgagcca

SEQ ID NO: 359 - DNA, 101 bp, Homo sapiens
tgttagaacttaaattacctggcatctcagctgcattctgtgccttgaaaytggcattgttcatagttagagaactactcctgttgtctccggtttttcct

SEQ ID NO: 360 - DNA, 101 bp, Homo sapiens
aactgagaacatacttgtgaaagaacccagaactgtccctgcaaggaacaygtactcacatcattcaggtggtaacaagatgtcggagtagaaatgagtga

SEQ ID NO: 361 - DNA, 101 bp, Homo sapiens
cctgcaaggaacacgtactcacatcattcaggtggtaacaagatgtcggartagaaatgagtgagttatagagtccagggtcttggttcaggttctggccc

SEQ ID NO: 362 - DNA, 99 bp, Homo sapiens
aaagcataagaaatgtgtttgttaacttaaaacatctgttcctaccacacraatatgaataagaataaaaatgcatatggattattcatcagtaaaagt

SEQ ID NO: 363 - DNA, 101 bp, Homo sapiens
gtgcatttttgagtgcctactaatggtcagatgctcagaatacaggaaaaygatgaaggagacaatgactccaccaccaaagagcctatagactggggagg

SEQ ID NO: 364 - DNA, 101 bp, Homo sapiens
ctagtttctggtggttgtcagaattcctttgtattccttgacttgtagatsaatctctccaatctcggcctccatcctctcatggttgtctcccctgtgtg

SEQ ID NO: 365 - DNA, 101 bp, Homo sapiens
agtcaaaatattactttctcagaacctatgctgtacagtaaaaatcaaacrgtagagaatgacgatggcaatgcattttctagtgcttcacatagtcgtgc

SEQ ID NO: 366 - DNA, 101 bp, Homo sapiens
gatttcccagcaccacgaacatggcaaattcagattatcgcagcagaactrtagcacaagggcaagaatgaccaaaggcccttcaaagcctggggttgacc

SEQ ID NO: 367 - DNA, 101 bp, Homo sapiens
ctccctggtaaggaagggaggccagacacctttgcctttgtaaacatatgycctgcagtaaacatatgtatgagggcaaaaaacggggagggatgggggaa

SEQ ID NO: 368 - DNA, 101 bp, Homo sapiens
aatttattgtaaattgcttttataatcattgatatataaagcatgctactrctaatcaattagttttatgtattaagacctatcagcatgtctttttttta

SEQ ID NO: 369 - DNA, 101 bp, Homo sapiens
ttttagaacaaatctggataaatgtgcaaaagtacccctttgcacagatarttaatgttttatgcttccattaaataaaaaggacttaaaatctgttaatt

SEQ ID NO: 370 - DNA, 101 bp, Homo sapiens
atccttttaaggaattcttcaaattagaacacccattccatctaaggtctycacaactatttacaaaaataagctttaccacgcactgacatttactacct

SEQ ID NO: 371 - DNA, 101 bp, Homo sapiens
ttcagctgtgtacaacgaaggcaaagatgctaaatcttgttttgcattcartaaagtgtcaagtgattaaaaacaaaaacaaaacaaacaaaaaaaacctc

SEQ ID NO: 372 - DNA, 101 bp, Homo sapiens
gagaatgaagggtttcactggaggcctctcctggtgagatgagttagaagytgatgcctcctgaagagtctctttctctcgggatctttatttcctggtca

SEQ ID NO: 373 - DNA, 101 bp, Homo sapiens
acagctaatacaacttcctcaggatgcccaaacagaaaacattttgttcartcttgtggcggctctgagaaaacacaactaaatcttattttgccactatt

SEQ ID NO: 374 - DNA, 101 bp, Homo sapiens
ttgtaactacttccaatgctcttaaaccatagctcctaccagttttacagygctccttttgtatctgaacttttatcaagaattactcattgtgttatgat

SEQ ID NO: 375 - DNA, 101 bp, Homo sapiens
tcacaagacatatgttagtaacatcattctaagtgaatttgcaatgccctstattttggcttttatttgaaaatacagagaatatatttattgaatatggg

SEQ ID NO: 376 - DNA, 101 bp, Homo sapiens
tcctgtaagagtccaagatcaaagtcagacccacagatacacaatattaasacacctgatcccaagcactatatgattacacagttttaagttacacacac

SEQ ID NO: 377 - DNA, 101 bp, Homo sapiens
aacattgtgtaattaaattaaaataaaagtttaataattttttataaacargtctgccatcactacttgctaaaaatttctaatattaaagagcttatttt

SEQ ID NO: 378 - DNA, 101 bp, Homo sapiens
taagcatcaaaaagatggcctttaacattcagtcttttgagtatcttgccrccttgttttcctgtcctcaggtcaccagcattggaaagaatggcagataa

SEQ ID NO: 379 - DNA, 101 bp, Homo sapiens
ttaaattgtgaatatatgtcttgaaacctgtaagacattttgccatggctmgaaagtgacaagtttgtgcctagtttattattacattagttgattgtcat

SEQ ID NO: 380 - DNA, 101 bp, Homo sapiens
aggcaaatctaaattttaatctagatcttgctgatgctaaagacaaattcrgaaattataacaatgatgaatgcacaagaaagatatcctgatattacata

SEQ ID NO: 381 - DNA, 101 bp, Homo sapiens
ataagaagcttatgattgataattgatattgataaaaatcacagcattaarcattcaaaaatgatgtttttaataaaagaacagcgattttcaaaagtctg

SEQ ID NO: 382 - DNA, 101 bp, Homo sapiens
gggtccaccacagtaagttttgcagtttatctgaatgattagatgagtatmgtgtgaaggttaaactactgctacatacactgacttaagtaggcagctgc

SEQ ID NO: 383 - DNA, 101 bp, Homo sapiens
gaatctcacaccaaattcattcatttggacatatccagaatctgaattatsattgtttgtgactatgtgcatgagtgtgcacgtttacacacaaaagacac

SEQ ID NO: 384 - DNA, 101 bp, Homo sapiens
gtagtacccatacttttcccatccataattgcattccatccacagttttayttgtttcacagagacatagaatcttacataggaagttaactttctaaagc

SEQ ID NO: 385 - DNA, 101 bp, Homo sapiens
catttgcctctcttcacttcatttttactattgctttctgtactaactggrtgataatgaatgtgatgttaaaagtacaatcaccatttacttagcatttt

SEQ ID NO: 386 - DNA, 101 bp, Homo sapiens
gtctgtatacagttcctgtaaacatttatgtgggcttaacaaggagtccayttcccacaactttggttctacaactgctaaagtgcagtttcaaacacaaa

SEQ ID NO: 387 - DNA, 101 bp, Homo sapiens
agccttctccatgtctttacatttctctatctttaaaataaaattgattgytttcatggaatggagtctgcccactgctttacataataagtgcatgatat

SEQ ID NO: 388 - DNA, 101 bp, Homo sapiens
ttgctcaggagttgggcagacctgctctctaacctaagctgtaccacctgytgagttagtcttctacctcttgatgcctcatcttcctcaatgagattcat

SEQ ID NO: 389 - DNA, 101 bp, Homo sapiens
cccaggggagaaaaagaggtaccgaaattaccaaattggagggcaaacttmttttatactgtaaaagcatacaacctagccaggcatccatagggccatta

SEQ ID NO: 390 - DNA, 101 bp, Homo sapiens
tttgtaatctttttgggggcaggataactgtgcaggaattttaacaaactkgactgatctactgataaggagaaggtcagccttatccccacaagtaagcc

SEQ ID NO: 391 - DNA, 101 bp, Homo sapiens
cccgggcctttattcttccctccctactcaggcagaatcctagaaaggaastgaaatttgatctgggcaatttttctatttgtaagtactttatagaaaag

SEQ ID NO: 392 - DNA, 101 bp, Homo sapiens
agattgtgcatattttctgttgaaaaaaaaattccttaagggtgtataacrgcatcctaaagagagcttagatggatgcaggaatctgatgaatgtccaaa

SEQ ID NO: 393 - DNA, 101 bp, Homo sapiens
atcttacagtaagccatataattaatgcagaaattaaaatagaattgtgamccagttacaacaaattggaggataaactgattttttgatgtggtttgggt

SEQ ID NO: 394 - DNA, 101 bp, Homo sapiens
aacttcaggattttcatcagtgctaaattcagtatcagccaatagaattaygagaccagcaagaaagttattataattttagtctgcttagttagcagtat

SEQ ID NO: 395 - DNA, 101 bp, Homo sapiens
aacttcatttcatcatcttcaaggccccacagcacaggaatcatgatttcrgtttaaggagaagagaaggatctccctgaagtattagccctggctgctca

SEQ ID NO: 396 - DNA, 101 bp, Homo sapiens
gatttcaattaaattgttttgccaagtagtcaatcttttgttcttaggagktcacagctagataatttaatgaacttcatttcatcatcttcaaggcccca

SEQ ID NO: 397 - DNA, 101 bp, Homo sapiens
tctatatttagtgtgtgaggaagcttcattttccttaagttggacgatatrtttctattatggcagaccaaaaccccagtggatgctttggttttgtttgt

SEQ ID NO: 398 - DNA, 101 bp, Homo sapiens
atgtaagtgtttcctaatcctactttgaataatactgaaacaaaacaaggwacctcattcattccagcaaaccaccgttgagctgttgctatgttccaaaa

SEQ ID NO: 399 - DNA, 101 bp, Homo sapiens
atgaatactcaggatagagacagaacacagattattagctgcccataaaawtgctgataatgaaactggtgatgaaaatattttggaactagataaaggtg

SEQ ID NO: 400 - DNA, 101 bp, Homo sapiens
taaatagaaagtgaacgtttccctgtgaaacctctagaacataaccaccayaaaaccttacatatcttctcctaaaaatgtttgtgcatgtatacaaacaa

SEQ ID NO: 401 - DNA, 101 bp, Homo sapiens
gagggacccatgtgctaacctgctccccatctcccctccaatagttttgtrtttctatgtcacacatacctattaatctagttcagggagagcacatgctg

SEQ ID NO: 402 - DNA, 101 bp, Homo sapiens
aaaggtgcttcattttcttcccccagtagaattgttgagaacgaggatgtsttcttcactatgtcagtgttagtcgcaaacagtaagagatgagtgaaagg

SEQ ID NO: 403 - DNA, 101 bp, Homo sapiens
aaaaatgtcttccagcatgttgaaaaagcactcaatttggaggcaacaaarccaagccaatattgactgcacaaacaatagggtacttcttttcagatcaa

SEQ ID NO: 404 - DNA, 101 bp, Homo sapiens
tcattcctacatgattcctggtggcagaaacgtgacgaggtgtgtctcagrtgactagtagtaaaaccccacatcttggaattgccaaataaacattcctt

SEQ ID NO: 405 - DNA, 101 bp, Homo sapiens
aaccaaataacagatatcctttactcttctcctctccacacaattcccaaygaagagagatatatgcaagaaacaatagccaaatgagaagcaaaatgcca

SEQ ID NO: 406 - DNA, 101 bp, Homo sapiens
ttctcagtgcccagttgaagactgacttatttaccatctatacccaaagakaaggtaaggttgcttacagatttgttttaaaaaagaggcaatgacactca

SEQ ID NO: 407 - DNA, 101 bp, Homo sapiens
tcataagacaggcttgtgatcatgcttcagatgccagaataaccagggccrtgcttagacctggatcagcagatctgtaacatgcagatagattctttcct

SEQ ID NO: 408 - DNA, 101 bp, Homo sapiens
cagatgtgcctcaatgtttaatagtgagttttttttataatagacagtacwttttgcccttctaaacattaacagcatcgctaagaggttacataaataag

SEQ ID NO: 409 - DNA, 101 bp, Homo sapiens
aaaccctagggaaatggttaaataaattatagtatgtacacataatgaagygttatacagctgttagagataatctttaggaatagaatttaacaacacaa

SEQ ID NO: 410 - DNA, 101 bp, Homo sapiens
cctcctggttcacagagggcacatctttgcaggttcccttcccattaagtytcacaccattttgatctacaagcatactgagcccgcactaaatcttaata

SEQ ID NO: 411 - DNA, 101 bp, Homo sapiens
aggactcagaattttaccatcagctccctgggtcttcagctcacagatggwagatagtgggaattcttagtctctataatcatgagagcaattccttataa

SEQ ID NO: 412 - DNA, 101 bp, Homo sapiens
ctttaagccagttcttggaagaaatgatggtcctgaatagtgggaatgagrtatggaatgttatgcagggaaggtaggagaggcctgtacacaagaaaaat

SEQ ID NO: 413 - DNA, 101 bp, Homo sapiens
cacgtcttagctgaaataaacacaagcagaagttcagtccagtcctcaaamcaggttttcaataaatgtctgtgtcacccctttaagaaacaggagagctg

SEQ ID NO: 414 - DNA, 101 bp, Homo sapiens
acagcccagaggcagcagaaagctttggacggaagataaagtaatagtaarcattatgcagcacttcaaataggatgtatccactacacggtgggaaacag

SEQ ID NO: 415 - DNA, 101 bp, Homo sapiens
taagatcttaaattgaaggctacatgtatcatagggtatcaaaaattatcrtatcttcatggagtggtccaatttagcagttgagaataaatttagctcta

SEQ ID NO: 416 - DNA, 101 bp, Homo sapiens
tgactaattgaaaacataatttccataaatattattatttttcataattcrgaagtctaacaactctgtgtgtgtattggacactcttctacatattttcc

SEQ ID NO: 417 - DNA, 101 bp, Homo sapiens
accatgcaaacgtatattttggaaacacagtgaaaatgattacaaacaaawttttcaagtacatattaccaacaagtgcctgtctttagatattcataatt

SEQ ID NO: 418 - DNA, 101 bp, Homo sapiens
ttttgtattcatagtgtaatattaatttttatctttctatactctttgtaygcccaattgagaatagtctctacttgtcaatagggtatggctacttgaac

SEQ ID NO: 419 - DNA, 101 bp, Homo sapiens
agttcttctgtagaatgtcagaaaatgtcatggggaatggaatctaagatktaataaggctgtaaaacagtaggtcatataaggttagttggcgttcttta

SEQ ID NO: 420 - DNA, 101 bp, Homo sapiens
agtggctacagtagtaacaaactgctgctgtgctttacttccttaccaggkctttcaggtttcatgaaatctaagtgtacccagaagacagtacacctctg

SEQ ID NO: 421 - DNA, 101 bp, Homo sapiens
tggcccattttaaatcaggttatttgttatttttaactattgaatcgtagkatttctgtatatattttggatattgatcccttatcaccttaatggtttgc

SEQ ID NO: 422 - DNA, 101 bp, Homo sapiens
gcctgaatctaatgccaccagaaggtcagaaggtgtttaactataggaaakctctagttggtctcagttggtcagagcactttgggttattgttaacctga

SEQ ID NO: 423 - DNA, 101 bp, Homo sapiens
caaggtgatatgtccttgagcacatgggagaccacctgctttatagtctcsgaattaacagagtttttaggtaaagggcaggtgctgctaccgagtaagta

SEQ ID NO: 424 - DNA, 101 bp, Homo sapiens
tggcaataggtatgtttttaccgatgtagcaattacatttcaattgaacasagggtaaaagagaagcttgctggcaggaactgcctttgtgatgtatcttt

SEQ ID NO: 425 - DNA, 101 bp, Homo sapiens
tatccatcacttaagctgatttcttttatactgtatctgaatgtctgaaayacccaacctacctcaatcacttagcatgtgactgactgtgattgtttcaa

SEQ ID NO: 426 - DNA, 101 bp, Homo sapiens
ctctgctcactgcttcaacagttttgctgcaatatcatgccaacttacackctagctctgcctgtcaactaaaacatagctctgaatcatcagtaattatt

SEQ ID NO: 427 - DNA, 101 bp, Homo sapiens
acccctctggttattttctcattgtaaatatgaagtaaaattatgagtacytcaaggctgaatgatttagaaatgttctatttattttatatcacaaaatt

SEQ ID NO: 428 - DNA, 101 bp, Homo sapiens
catattatttttgcaaagtgaaaaatattattttaaaacatacaataaaargaacatgtaaaagtattttttttataaagaatgaaatttgtagctttcaa

SEQ ID NO: 429 - DNA, 91 bp, Homo sapiens
caaggtgtcataactatagtgaacctagtagccaccaacgggttaggcaaygattggagacagtgttggtgggcttgagaccacaaaggcg

SEQ ID NO: 430 - DNA, 101 bp, Homo sapiens
tcaaccgttttcttaaatttcattctatcagcagagaaatttgttaggaarattttagtcacaatctagataacatatgtttatgttgaggtgtacaaata

SEQ ID NO: 431 - DNA, 101 bp, Homo sapiens
atagaaatataggctattaaatcaagtgctctcctggataatagaagtgargtgttattatcaaactcttgtcagtaacagattcctttctcacttctgcc

SEQ ID NO: 432 - DNA, 101 bp, Homo sapiens
cagtagatggcatatgtaggctagagtcaaatggaaggcagagaatatcartgagaaagaatatatggtagggagagaccaaataggaggaaaagaggaaa

SEQ ID NO: 433 - DNA, 101 bp, Homo sapiens
ggggtttaaaatgaaatgcagctcccttttggcattttatgacttgtaacrtgaccatttcttagggaaaaaaatgaaggctatcaatatagttttattaa

SEQ ID NO: 434 - DNA, 101 bp, Homo sapiens
agaaaactctcccaaccataaagacatgagttgccttgttgcattaaaccrcattacaaagaaatccattagccactctgagcactgctctcctttggggc

SEQ ID NO: 435 - DNA, 101 bp, Homo sapiens
tgcacccttatctctgcccccagctgggaggctgatggatactattaaackgagcctctgtaagtggcatttgtggtggcaggggcggggctgggggttgg

SEQ ID NO: 436 - DNA, 101 bp, Homo sapiens
acatttatttattctctgtctctctcactggaggattgacattctgggtcrcttgcaggagggtaactttcatacagtgtgtgtgtcttgggtccagttga

SEQ ID NO: 437 - DNA, 101 bp, Homo sapiens
gccccgcagctagcattacattttaagatggagaaactaaagctaagggarattaaaagatccagctaaggtcatgcaataataccccagctcaggctatg

SEQ ID NO: 438 - DNA, 101 bp, Homo sapiens
aaatagatttatagcatttaataattaaaacacatacaaccaaaacattgkgtagatataaacatatttaaaaaattactagtaagtatgaaaatcaaaaa

SEQ ID NO: 439 - DNA, 101 bp, Homo sapiens
tattagaaatagcaagcaaacaaacatgcaagcattcttatgacatggaakgaggatatgggtgttaacattgacaaaaaacaaacaaacctcccacttca

SEQ ID NO: 440 - DNA, 101 bp, Homo sapiens
ctagaagagattcattctaggtggaaggtggagaacaaagtaacacatagytcaacgagttaataagcatttggaacagtgtaagtaaatacatagtaagt

SEQ ID NO: 441 - DNA, 101 bp, Homo sapiens
atttgggtatgagcctattttgcaggagttgactaaggtaatagtaatcgrtaggaattaaggggattagggctgttatagccatggaagatacatgtttg

SEQ ID NO: 442 - DNA, 101 bp, Homo sapiens
agtaaactgagacaggtattatgactggaaactaggtggtttacagttcarctatttggaaatgctatctttcctcatactaattttttaaatctaatgct

SEQ ID NO: 443 - DNA, 101 bp, Homo sapiens
tttaacagatacattattttggtcccaactgcagtgtcatctgggaagtcraatgcctctttgaatgtgccgattgttaagtactataagctccagaccta

SEQ ID NO: 444 - DNA, 101 bp, Homo sapiens
ttgtaacatcacgattagtccaactccaagttccagactccatggaaaacrtttaacaatatgagtgaatacttctgcaaataagaatacacccaatgaga

SEQ ID NO: 445 - DNA, 101 bp, Homo sapiens
aaagaacaagaatcagattttttcacaaatgaaatcaatcattcatagacytaataatgccaatagtatttaaattgttcctgataacacataaaagatca

SEQ ID NO: 446 - DNA, 101 bp, Homo sapiens
ttgtcataccttggcctcgtctcaacttcctctagacatcccctatgctaytggaaaaatatgttggaggagaacatggcaaaatacggcccttctttggc

SEQ ID NO: 447 - DNA, 101 bp, Homo sapiens
aggtggtaggataatcagatcttatttgtgggcctggttttctcaaatacrgtttgtgctttatcaaatgttttctccaattttctatactttttcaaatc

SEQ ID NO: 448 - DNA, 101 bp, Homo sapiens
agaaacagttccaagaagcaatgagaaaaggcagagctggtgatagttcastgctagagaccattaaacatccatatcccaaatggttccagatcagacct

SEQ ID NO: 449 - DNA, 101 bp, Homo sapiens
ggaaatgagctataattttcttcgtatagtatgttattcctctagtgagawctgattaaaaatatgccagtgttcaggcacattttattattcaccatatt

SEQ ID NO: 450 - DNA, 101 bp, Homo sapiens
tgagctcattgtattagacaaaagtctgtgcattttgctgaaattaatgtraccttttgtaaaatagatataatccagattaattttaaaatcataggtta

SEQ ID NO: 451 - DNA, 101 bp, Homo sapiens
aaagagaacaagacccaatactacagaaattctgatatttctccttaagtwcaattggattttccagctggggagacatgtcagaaataagggcacaaggc

SEQ ID NO: 452 - DNA, 101 bp, Homo sapiens
cctaaataatttgattctagagactacactctgacctaaaagagaacaagrcccaatactacagaaattctgatatttctccttaagttcaattggatttt

SEQ ID NO: 453 - DNA, 101 bp, Homo sapiens
gcattagatacaacagtttgatgttatatcttctttttctgcccttataayggtacttatcagtctgaatatcaactacctgttcaggtagtttattctct

SEQ ID NO: 454 - DNA, 101 bp, Homo sapiens
tgctactccctgaaacctgtgagtattatcttatttggaaaaatggttatygcaaatgtaattaatttgaagatcttaaaatgcagaggtcattctagatt

SEQ ID NO: 455 - DNA, 101 bp, Homo sapiens
tacacagagtgagttatccttcttcctatttcttttttttgcttatcaatrgtaaaacaatatagaatgcttaaaaattaggaaaaaatcgtaagcaatca

SEQ ID NO: 456 - DNA, 101 bp, Homo sapiens
gtggtctttctagagattaaatttgatgataaaaacacttatacacaaaakaattgattagaacaataaaattttcttaaaggattgatttactcttaatg

SEQ ID NO: 457 - DNA, 101 bp, Homo sapiens
acgaagaatggagataaccatttagctactgcacaattctttttacaggartatcttttttctgtaaatttaaaactgacaaaaaaaaatttcagtcatta

SEQ ID NO: 458 - DNA, 101 bp, Homo sapiens
tgatcaccttccaccctccccaatacctgggaaaaactctcccagacacartgaaatctgctccagctgtggtggtagtgactggagccagatgccctacc

SEQ ID NO: 459 - DNA, 101 bp, Homo sapiens
tgaacaggttttcaaaatgtttgttgttgttcctatcattattgtctccgytcttggaaattctcattaatttataacaaagttagctctttacgcggacg

SEQ ID NO: 460 - DNA, 101 bp, Homo sapiens
cccccagtcttccttcttgttttcaaataaaggttttggctgagtttcctytccataactatgactgaaaaagatagaattgctcaggattttctttcatt

SEQ ID NO: 461 - DNA, 101 bp, Homo sapiens
agtggcaattttgttttcctaattgacttacagatataagacaaacacgayctaaattacattaagctgtgtgtgtgtgtgtgtgtgtgtgtgtgggcgga

SEQ ID NO: 462 - DNA, 101 bp, Homo sapiens
taatatttttaatgtttattcatatacatgcttattaataaagtaaaccartgtattctgtatgtggttaaaaaagaaaaccaaaactgaagctatgtaag

SEQ ID NO: 463 - DNA, 101 bp, Homo sapiens
tttacaaataaccacatgtgctactgactgctcatctactatgtgtcattwtccaaactcttgctctaaatatttgatggccatctaacgttttctggtta

SEQ ID NO: 464 - DNA, 101 bp, Homo sapiens
accccacaccctggtatgctgtggtgaaaggacagcactattaaaagaggscataatcctatctacatggcaataaccattactaacatctttgtgttttc

SEQ ID NO: 465 - DNA, 101 bp, Homo sapiens
caagtaatgatggtgtgtcaagggatagttatattctattttatatccaarcaagtcaagctagaactgaaatatgttctattttttttaatctgggcata

SEQ ID NO: 466 - DNA, 101 bp, Homo sapiens
agaaaaaacctcctgtattaataaattaaatatttgaaatgcttctggaartgttaaattatcttcaggtgggcaaacttgttctaaattcaagcccaggt

SEQ ID NO: 467 - DNA, 101 bp, Homo sapiens
tcaggttaatagttgatatactgcattacaattctagaatcataccttttwatactgttgaatattttcacatataaacatgatctgtctttttataaaca

SEQ ID NO: 468 - DNA, 101 bp, Homo sapiens
ttaggtaaagtttttttctcctggagactaggtctgctttatacagaacaktctgggagtatttcacaatgttttctcttccccttcccctgccaaaactg

SEQ ID NO: 469 - DNA, 101 bp, Homo sapiens
atcttattttttacactacttggatttatgtaataaacaagtacatgctaytgtttaatcaaaaaagaaactttcatgacatatcatagaaagtgtggatt

SEQ ID NO: 470 - DNA, 101 bp, Homo sapiens
ggtgcttctaggattattctgtgctccaacctttaactacttgcagctctwatcatagcaaagttcctgtcatagttcccaagtacataaaccttttaaga

SEQ ID NO: 471 - DNA, 101 bp, Homo sapiens
ttctttttctactgaaaaagggaaaatagttcttacctgtttgttctatgytaagagctttacaacatttcaaaatctatgctatcaaaagaagttcagtg

SEQ ID NO: 472 - DNA, 101 bp, Homo sapiens
cttacctgtttgttctatgttaagagctttacaacatttcaaaatctatgstatcaaaagaagttcagtgaaatatttttatttaatacatttattgtttc

SEQ ID NO: 473 - DNA, 101 bp, Homo sapiens
aattaccttacttgatctgtaaggagaattaaatatgaggataactttctmctatgccctctaaaacgtcctggtgaagaacttaatagaagcctatgata

SEQ ID NO: 474 - DNA, 101 bp, Homo sapiens
tgcacacttgggcatactataaattagcctcagacagaggtctgctatgamacagttaattctgaaaagttttctataaactccagtgataatgtttcttt

SEQ ID NO: 475 - DNA, 101 bp, Homo sapiens
ttgaccaaaacatttccatgaccttttccctgcatcataaatcacaaaaaygtaaagattatccctatatgatttaatgctatgataaattaagttttaaa

SEQ ID NO: 476 - DNA, 101 bp, Homo sapiens
taaggacagaatgctgtaagtgaaaggccaggatggaagtgaaatctcaaycaggggaaataagaggagcaacctcagtaattaatggtaagggtgatcaa

SEQ ID NO: 477 - DNA, 101 bp, Homo sapiens
aacacaatgcaacattagcttcttgtttcttgaaatgtgtcccgtaccatractactccttgtcgtggggataaaatgactccatctgttttaccagccct

SEQ ID NO: 478 - DNA, 101 bp, Homo sapiens
taaactcaggtaaaatgttggactttagttttttcatcactcagaacaaayggtgatgatagcacagtgtagatgtaagaagctccatgacccccaacacc

SEQ ID NO: 479 - DNA, 101 bp, Homo sapiens
ctctgtttacactattttctcctcgggcagcacataaaaaattaattcaaytccctaagtagacaatggttcaataatacatctcataaatcctatagcat

SEQ ID NO: 480 - DNA, 101 bp, Homo sapiens
gaacttaggcaagtgacaggcattctgtaaatctggaagtgaaaaaaatcygttgtagtgaatttgatcagacacatgttcttctgctctttccccaaata

SEQ ID NO: 481 - DNA, 101 bp, Homo sapiens
ccagccaatgcgtttgcttacagctggcttagacctttgcagtaggctacrtttttcccgaaattgacttatttgcaaaccctgccttctcaataaaatcg

SEQ ID NO: 482 - DNA, 75 bp, Homo sapiens
tctacaaatccccaggtctgatttractcacctttctcccttactttgagaaacatctgttgcatatctagcatg

SEQ ID NO: 483 - DNA, 101 bp, Homo sapiens
aaaaattctactaaaagaaaacaattttgtcattatttcctactgctgtcmattagactgtgcattccttggaaggaagatctattcttactgttatctgt

SEQ ID NO: 484 - DNA, 101 bp, Homo sapiens
ttgattgaaaatgttcttcctctttgatgaagaagagccacagtgaccgcmaaagaaaccgatttagaacagtttcttctaaagctttccgcttggacttg

SEQ ID NO: 485 - DNA, 101 bp, Homo sapiens
gcccatttcaataacaagggagcactcttccttacattttcctcctagttrgttcagttaacacacacacagcattattacaacagttagtaaatgaaatc

SEQ ID NO: 486 - DNA, 101 bp, Homo sapiens
atccccataacagatgataatttaaaagtttgaaatgctatgagaattatyaaagtaggacacagagacatgaagtgggcacaaaatgttggaaaaatgta

SEQ ID NO: 487 - DNA, 101 bp, Homo sapiens
aaagaccacaaaacaaaaacaagaaacatgtgggacaaacagaaaccgaasagtaatatagtgaacttaaatccaaccataacaagagttacattaagtat

SEQ ID NO: 488 - DNA, 101 bp, Homo sapiens
tttacaaaacagagaagataataccttttcattccaccccttggaattcayttgttcatttactagcttattcaattattagctgttgagaacctcttatt

SEQ ID NO: 489 - DNA, 101 bp, Homo sapiens
tccccatactcaaaaaatgttatattgtctaggtaaaccatatgtgtgcargttaattacttagaagagaagctgccagatctctttgagttgttatctac

SEQ ID NO: 490 - DNA, 101 bp, Homo sapiens
gtgaaaagctgaacagactgaaaacttaaaccccttcttggatccataaaraggtgaagacaaagggcaaactgctaagctctagactgaagagacaggca

SEQ ID NO: 491 - DNA, 101 bp, Homo sapiens
gcatctttaaaccagcctcttgtaatcctcaaagattccaaggtcgcatcrttgacaggagcatttcttcagagcagggcctcctggatctgcagaggacc

SEQ ID NO: 492 - DNA, 101 bp, Homo sapiens
atgctccagttctacgggccaaaacatctcctcttctcattttactcgcawctaagactcctctgtgggaaagaaacagttcctattttctcttttctact

SEQ ID NO: 493 - DNA, 101 bp, Homo sapiens
atttcatgagaaattgtcagtgacaggagagtctgagctggatgttgggcrtactccactggtatatgggttcttcctgccacttgatattgacatcgaga

SEQ ID NO: 494 - DNA, 101 bp, Homo sapiens
tgtttgttcaactgtttttggcaatgttagacatagttcctttggttccckctttttgcttctgcttatacttctgtctccaggagccagatgcaagtgag

SEQ ID NO: 495 - DNA, 101 bp, Homo sapiens
agtgagagtcgggtagacacagtaagaaaaacctcaaccgaaaaaaccatygtgggctgctttaccagctagttttctgactctgcctagagttctagaac

SEQ ID NO: 496 - DNA, 101 bp, Homo sapiens
ggaatttttgcatttcatccaaattctcaaatttaactgcatgctcatttkgataatattgttctccttttgatgttttccatatgctttatttttgattt

SEQ ID NO: 497 - DNA, 101 bp, Homo sapiens
caaaagaaaccatctccccttttaaaataagcaaataaaacaaatagaccrcatggcaagactatgtatctatactgtgcacacacgtgggtatggatcca

SEQ ID NO: 498 - DNA, 101 bp, Homo sapiens
gagagaagaaaaagcattcttaaataatttgggcacatttcttatcagttygagagctaaatgatagatcaaatatattcatttgtattgccattgaaggt

SEQ ID NO: 499 - DNA, 101 bp, Homo sapiens
gcagggatctgaaaggaaggcgtgacaggaggagagccctaaatacagcaragtggttcccaggctttatgactagagaagctactcagggagaaggctga

SEQ ID NO: 500 - DNA, 101 bp, Homo sapiens
acttctgacaacaccaaggttttatttgttcaggaaaagaccagaaacaayagaagagtgatgtcaggtgagtaagccaaacttggccaggtgtgtcattc

SEQ ID NO: 501 - DNA, 101 bp, Homo sapiens
tttaaatttatatttacattacatttctttctgatatctcagcacctctgsaacataggaatgtaagctgcagaaaactgtaaaagaaattgcatatcctg

SEQ ID NO: 502 - DNA, 101 bp, Homo sapiens
gttgcaggacagagaggtaactcgggtaccaatctattgagtcagtggtcrtccattgaggagaaatctgtatcttttcagggactcagcaacacgacaca

SEQ ID NO: 503 - DNA, 101 bp, Homo sapiens
aaatctgtatcttttcagggactcagcaacacgacacatgtttctaccatragtcttttccaatggttttgcagagggaatttcagattttagccgatgac

SEQ ID NO: 504 - DNA, 101 bp, Homo sapiens
ccactattgattattgattaaacaattatagctcatattttaacaaattaytatggagccattaaaacttacaatttagaatattttaaaacatgtcttgt

SEQ ID NO: 505 - DNA, 101 bp, Homo sapiens
tggaaggagaagttatagctagcagccctgcaattacattcctccagatcyctgatacaaaagatcactctcttctctcagcacacatcaagcactcccag

SEQ ID NO: 506 - DNA, 101 bp, Homo sapiens
tgtttattcttctatttccacttatactttaagaaagatatttgattacgkgaattgctcaaagttttaaacagactgaggggagcatctgtctgaaatta

SEQ ID NO: 507 - DNA, 101 bp, Homo sapiens
attttcatgaacttatgtaggtagtcaaaatatcaatatttatggctttartctccacattctcagcaagtcaaccataatccatctagagcaaggtgagt

SEQ ID NO: 508 - DNA, 101 bp, Homo sapiens
ccctgtttctatgattctttaattgtattacttacagaagctctgtaaagkgcttagaggcatggtttataggaaagatgtcatgtaagatgatggtgtcg

SEQ ID NO: 509 - DNA, 101 bp, Homo sapiens
cattttgggaagactattctggtagagagtacggttgaagcaaaatgaagrcggagaacacatcatagaaatagcatcttttacatttattctcttaatat

SEQ ID NO: 510 - DNA, 101 bp, Homo sapiens
taattaaaatgttataataatagctatctattgcattcttggtaggcaccrtgataaagtcttaaaaaccttattagtttggtattattggctctgtttta

SEQ ID NO: 511 - DNA, 101 bp, Homo sapiens
aaaaaaagcctgaggcttgaaaagttttttggccaagtcacacataagttkcaaagtgagtgtggactttaatattaaaaacaccaataataggcattaat

SEQ ID NO: 512 - DNA, 101 bp, Homo sapiens
taatctgttgctaccctgaagatagcactaaagtgattaaccaagtctttyctctatgggcagcacttcttcacctttttgtctctccaaattttcttcct

SEQ ID NO: 513 - DNA, 101 bp, Homo sapiens
caaatatagcccaaagaaagccaattttatatgtgacaatgtttcctttaygatttttgtactaaataaaccaaacttcacctttacattagcatactgtt

SEQ ID NO: 514 - DNA, 101 bp, Homo sapiens
atacatgatcattacaaaaaatctgaaaaacagtagggaagataatctcaygctgttaacgttttggtatatcttttatctatagatttttgttgatattt

SEQ ID NO: 515 - DNA, 101 bp, Homo sapiens
ttaaatgccatttgaaagaacaattctagaagagttctatcagtctaattmtcatgttacctgaaaatataaacaagtttaaagtcagtttgacagttgaa

SEQ ID NO: 516 - DNA, 101 bp, Homo sapiens
caacgcaagttagcttccagaaaataattctaaggctcaaaataactggtraaactgaggttaaaattttcaaaaccaagtatggataaaatgatatcttc

SEQ ID NO: 517 - DNA, 101 bp, Homo sapiens
gtcccaattcttaactattttactaaaaataagcctgcctatgtttatacygttctgtccataaagaaagaaagaaaaaataagccagcagaacaaccagt

SEQ ID NO: 518 - DNA, 101 bp, Homo sapiens
acactttggacaagcctctttgactctgtagcctacctggacatataaggyttttccctcaatacaagtacctacaataaggcatatgggcaataaaaact

SEQ ID NO: 519 - DNA, 101 bp, Homo sapiens
aatgtgcaggagagggtggatttccggtactgctatttttaagagcagacktggtcattctaacaatattatagacaataaaagagatgccaaaaaagctt

SEQ ID NO: 520 - DNA, 101 bp, Homo sapiens
cacctcgcccagccacacaatacgttaacattttatatttgaaaagcaacrtactgtttacaaatggctttccctccactatctcatttaatcatcatagg

SEQ ID NO: 521 - DNA, 101 bp, Homo sapiens
cactgaggattatgaatcttatgaaagacaaatgccctattttgagtacayggtgatatagttggtcaccttcaggtatgcttatttatgttttgcaggat

SEQ ID NO: 522 - DNA, 101 bp, Homo sapiens
cctagtctcctcatgaaaaatgggccaccagtgtttgatgccaagaagctrattgttacttaaactctatcttcctggagaacttacaaaagtagtatgtt

SEQ ID NO: 523 - DNA, 101 bp, Homo sapiens
ttgcagctagcagccaaaatagaaacacctgaaactcatttaacacaaatrtctttgactgacaactttatctctttcttccagggataatttacctcttg

SEQ ID NO: 524 - DNA, 101 bp, Homo sapiens
tattttaagcagaagatctttccacaccttccctcagaaatggatctttcstttggtactactgtattatttctctttctgtataattgaatttctatgct

SEQ ID NO: 525 - DNA, 101 bp, Homo sapiens
tgatgggcttttgttttttgttttttaaaggacattgtgttagttatctayggctgggtaacaaattatcccaaaatttagcagcttcaaacagccagccc

SEQ ID NO: 526 - DNA, 101 bp, Homo sapiens
tctcattggaattttggcagatgcagcagtctgttgggagtttcgttaacrtgaaagaatgatgttagttccttagaaagtgaggaactctgagtaccctg

SEQ ID NO: 527 - DNA, 101 bp, Homo sapiens
tcacttttccacatgactttttaaaaagaatagtttcggttttttataagkaatggaatgccatgtggctctattattaggtttttcttggcccactgcac

SEQ ID NO: 528 - DNA, 101 bp, Homo sapiens
cacagtaaaatgctttgtagttctacaggtttttctgcttaattgcttagygtttccccaaaattcttgtaaacctctctatgtcttcattcttttaagtt

SEQ ID NO: 529 - DNA, 101 bp, Homo sapiens
acttttgctggatagccaaagcataaacatatataatataatgataaggcrtataaggaaaaatcaagcagagcagagggccagggatggagtggattaca

SEQ ID NO: 530 - DNA, 101 bp, Homo sapiens
acattcatagtatttaactctatagatgcaattttccaaaaatctccttcygcgttctaccacagcaccccttggagaatcaaggttatatctgaacaact

SEQ ID NO: 531 - DNA, 101 bp, Homo sapiens
cacatcaaaaatgtaggcttacttttaagtagctatatttttaaaatctgwgtcctgtttttgatctagtttttattatatcttgcattttacctgccatt

SEQ ID NO: 532 - DNA, 101 bp, Homo sapiens
tactgtggtttaattcttcaactgtgtattacccaccataaaaaatgaacrgcgcaacacctcattgcattgacaggcaattccattatttgattttaaat

SEQ ID NO: 533 - DNA, 101 bp, Homo sapiens
gaagaataaagaatggccccacctgagtagcagggcattgactgttccatraattccaaggtggaaggagtatcacagagccctgagtgaaggtttctgct

SEQ ID NO: 534 - DNA, 101 bp, Homo sapiens
tgtataacatgtgcagtggtatttgagtgactcttgcatttgtctttccaygaggctggcctaccatagccatggggacagtgtttcagaattcctatgac

SEQ ID NO: 535 - DNA, 101 bp, Homo sapiens
acaccagtacagcatttccaataattagcgtttccaagctatttctatcaytttgtacatctggttactattcaggggtaaaacacaacaaaaaaaatcta

SEQ ID NO: 536 - DNA, 101 bp, Homo sapiens
cattccttcattttcagctaataagtaaggagcattaaaataggcatagargaagtaaacctttaacaaccaacacttcattgaggtagagactgcactcc

SEQ ID NO: 537 - DNA, 101 bp, Homo sapiens
actgatgaatgagttggcaatttgggatcctggccaaatgcattccttcaktttcagctaataagtaaggagcattaaaataggcatagaagaagtaaacc

SEQ ID NO: 538 - DNA, 99 bp, Homo sapiens
caaattgccaactcattcatcagtcatttgcttcatgttcctaggaggyatgtatatcaaatactgcaccagacgcaattactgaatagcgagttatag

SEQ ID NO: 539 - DNA, 101 bp, Homo sapiens
aatgatttgccagccccaggaatccaaagagctgaagttttaatctctgcrtaggaacaggtagggcagtggaattaagaccttcacataaagttggaaga

SEQ ID NO: 540 - DNA, 74 bp, Homo sapiens
actcattctagatcccacgaggctttcagaaggaaagtacagagaatgtawcttgtatttgacttaatagtttt

SEQ ID NO: 541 - DNA, 101 bp, Homo sapiens
ttaagggaggttttatataatctgactgaattgcacagcccgaatgtttcygtgttcccataagagtgatgaatgaataaacaactgaaaacactaagcta

SEQ ID NO: 542 - DNA, 101 bp, Homo sapiens
ctttgagaaacacacagtttgtccaacaatcagaagaaaaatagaaaaccrtacttgaatccaacctggagtcacaagttagtgaattcaactgtctcaat

SEQ ID NO: 543 - DNA, 101 bp, Homo sapiens
tcaaaggtcagatatgttacacaacgaattgtgtcttttaaagggagcacractgaaatatttctggatagaaaaggcagaacattcttagaatatcttga

SEQ ID NO: 544 - DNA, 101 bp, Homo sapiens
actctctcaaagaaaaataaccctgagccccataaacatgcatatttaatwctttattgacagagaacagaagagcagtgactgccactggctgcaaggac

SEQ ID NO: 545 - DNA, 101 bp, Homo sapiens
gcatgtagtatttttcttcaacagaaaaggctaaaatattttccacttgamtaaggcagtattaaaaacgaattagattgtatgtaattcagcttctgtaa

SEQ ID NO: 546 - DNA, 101 bp, Homo sapiens
tttctaatttaaactgtcttattttaaattgttttaaagttatatttaagyccatttcagcacaaaaatatcaaccattactgaaaaaattaaatccataa

SEQ ID NO: 547 - DNA, 101 bp, Homo sapiens
cagccctgaggggaggttagggtggaatggcagaaaatctgtggttcttarttcttgagcctttagatcatggagtcccatttcccagaagcagaaaggct

SEQ ID NO: 548 - DNA, 101 bp, Homo sapiens
acagaaaaagaagccttgaggttttagaaaccaaggattgcacttttacartttcagctctaacataaaattggcattacttctgttcagcagatggatat

SEQ ID NO: 549 - DNA, 101 bp, Homo sapiens
aacagtgaaactatggaacaattgaaaaggtctttcctcctctaaccagasaaataaatcttaaaatatgaagatcaaggactgctaaagacaacaaacac

SEQ ID NO: 550 - DNA, 101 bp, Homo sapiens
aaaattgtgatgagttgataatttattgcttctagtttttgctactaaaarttaataataggaattcccacttgaataatgtttgatgagtggcactggtt

SEQ ID NO: 551 - DNA, 101 bp, Homo sapiens
tagtcacccaataataaaagctaagaatccatacagtgcttttcaaagggytcctgcaagttgtttttcattaaaagtattgttattattatttaatgtcc

SEQ ID NO: 552 - DNA, 101 bp, Homo sapiens
tggtaaaaccgtggttaatgataaatattataaacatttttactggatacmttgcactggagggaaaatgagcttatatgggtaatgcagcaggctgcaga

SEQ ID NO: 553 - DNA, 101 bp, Homo sapiens
tatcttctttagtgttcagtatttacaagcttaatgaagattttagaaatkgtgaggtataaaaacccctagaaatatgccactaacaggtttctttgaaa

SEQ ID NO: 554 - DNA, 101 bp, Homo sapiens
aaataatcccactttactgccaaagacacccggatacccattacaaattcrgttgtcagataaatgaggttgcattggaggtgccctatttcagaataagc

SEQ ID NO: 555 - DNA, 101 bp, Homo sapiens
tctatttgccaatataatatctactcttggagtcacagagtcttaactgtycagctagttgattatgttttcactgtatagtttgtagggagtataggatt

SEQ ID NO: 556 - DNA, 101 bp, Homo sapiens
gttttcggttactaatgatctcagctctagttttaatggagcatgaaggtmtactctaaagaaaagataaaaggttttcagagacaaaataaagaagactt

SEQ ID NO: 557 - DNA, 101 bp, Homo sapiens
tgcctcttctttaagagctggtattctccagtcttcctggatgtttctaamcctgtcgagacacagaccttctccaaaataatctctcatagtcactcgtc

SEQ ID NO: 558 - DNA, 101 bp, Homo sapiens
actggcagagaaaccagttaagagacaattactttagtccagggatgagayagtcgagacagttgctctcaactatcagagcaagacaagataggggaaaa

SEQ ID NO: 559 - DNA, 101 bp, Homo sapiens
tggagccaaatctctgtgccacaggtttcatgttaattctatgacatcacrgaacctttctttttctttgggcaatcctccataaaagagaagtgtggtag

SEQ ID NO: 560 - DNA, 101 bp, Homo sapiens
ggttttgtagttacatgtgttccttcatgtggagaaagtccaattacagtscaacaagaggttccaaactgtggctccttaatgtctcaacagaaacaggg

SEQ ID NO: 561 - DNA, 101 bp, Homo sapiens
ctttggctaaaacattttagaaaatcagtggagaaatttaatgagttttamtaattattcgattaatatttcttttcaatacagcactccatttctccttc

SEQ ID NO: 562 - DNA, 101 bp, Homo sapiens
tgaagatgaaaaagatggaatgtgctctgggttttaggaactcaggaaacwttattgatcctataatgcttctaagcttgaccaagggaagggaagtttct

SEQ ID NO: 563 - DNA, 101 bp, Homo sapiens
aatgataaatcacagtgacttagagtttgctagtagaactctgagtacatmgaaccttatttccaagtacttagggactattcactccctatgtatgtatg

SEQ ID NO: 564 - DNA, 101 bp, Homo sapiens
ttgagattttggatagatgcatatatgcacattgattaatcttataacttkcagagctagagcaccattttcattaacaaatatgctgaggaagaagagga

SEQ ID NO: 565 - DNA, 101 bp, Homo sapiens
taatgctagttgaataagtgaaatgacaacatgagagagaaatagtagcaytgtagaagttcacattttttttttcaatccagacatatttattcaaggta

SEQ ID NO: 566 - DNA, 101 bp, Homo sapiens
ctatgtagaagataatagagtcccatttagtaaatggttaaattctaacaycattttatctttattccataaatacctctattaaaatggcatcatactgt

SEQ ID NO: 567 - DNA, 101 bp, Homo sapiens
gagtggggtaggtctggaaattattatttaagcaatgctttccttagtatscacttaatgcagatgaacactggtctagttaaggacaatattgttgttca

SEQ ID NO: 568 - DNA, 101 bp, Homo sapiens
atggtgtacagataacttactgcagatcttttcttgtcacttatagagaargttagattaataaagttgaccaaagacaaaatatgtaataactaatgcca

SEQ ID NO: 569 - DNA, 101 bp, Homo sapiens
gaaagctcctctagtaatttggttatatttttattgttcccaccaactgcrctaaacagaaattaccccacttacttaaaattaccctgcttacttcatct

SEQ ID NO: 570 - DNA, 101 bp, Homo sapiens
acagtacttaggtaatcagtttttagaaatctattattaacacatctttcyttttgttactatgacaggttattggcatgttatttcaaacatgaaactct

SEQ ID NO: 571 - DNA, 101 bp, Homo sapiens
aataagaaggaacttggatcttctctcacttgttaagaatgggctttcctyctaaaatgccctactaagacttcatgaaacacagaagacgaggtgggaat

SEQ ID NO: 572 - DNA, 101 bp, Homo sapiens
cattatttgtagtactttttttctctttgaaatctcataggatagtcacayttataaacattcccaatattcggattctagaagaaatgcaattcattaaa

SEQ ID NO: 573 - DNA, 101 bp, Homo sapiens
aagttattctataaaaatatacagattttctggaaataggcaagttgtatwctcatatatgttatgctagcctcagaggtcaagacatctttaacccagac

SEQ ID NO: 574 - DNA, 69 bp, Homo sapiens
gaaaatgccacctaaataagatagaaaaccacctccaggttggcattggcrgattctgtcagtgctata

SEQ ID NO: 575 - DNA, 101 bp, Homo sapiens
tgcatgggtttaacacttgggctttccagcttgacctggctaatatatatscctatgtcagtagaaaggctaacctggagtttcaggagacaggcaggtga

SEQ ID NO: 576 - DNA, 101 bp, Homo sapiens
tggtaaatgttatagggttaagtaaaaataatgtttatttggcaattatcragtataggaactgcaaagacaaaactattctaaaaggtttttttaaacat

SEQ ID NO: 577 - DNA, 101 bp, Homo sapiens
agtatatattcactcgttcactcaagaaagttactgaatacttattctgakcttgtacatatcatatgctctagcaatcatgtcagatatctagatttagc

SEQ ID NO: 578 - DNA, 101 bp, Homo sapiens
gtttctttttcctctgctgtcaaatgtgtgtgcaatctaatgataaaggarccaaagtcttctagcaggactctcggcagagctccatactcatttacctt

SEQ ID NO: 579 - DNA, 101 bp, Homo sapiens
gaagacaaagacaagtaaataagcttaaatgaagcaaatctagtttctgcyttcaaggagattgtggtgaggaagaagataagacacaggcgtaatatctt

SEQ ID NO: 580 - DNA, 101 bp, Homo sapiens
ttgctgagtacagatgctgaagctgttagtactcggtgggaaataattgcsgaagatgaaacaaaggaggcagaaaatcaaggcctggatatctcttctcc

SEQ ID NO: 581 - DNA, 101 bp, Homo sapiens
cactgatcttgttagagttgcacttggggaactagccatgctactgatccrtgtctttatgcaattccattttcaactagagtataaagtttataatgcat

SEQ ID NO: 582 - DNA, 101 bp, Homo sapiens
tcatgactataagggattttggagcagtatctcctctgaggattcaaaacyaaaatgctattcctaacagaggctctgtggtggagacatttcatttcttg

SEQ ID NO: 583 - DNA, 101 bp, Homo sapiens
aagggtccgttggtggataaagcagtgaggcaagtggtgtatacctgtgtwatgatacaaaaaacagacacttggtttcctgcggtggggatatcggggag

SEQ ID NO: 584 - DNA, 101 bp, Homo sapiens
tctgtccctatgaattaaaattgtgtactttaaaccatataataaaaataytgcagatcagtgatattctccagaatgttaatgggcatactgcaaagttt

SEQ ID NO: 585 - DNA, 101 bp, Homo sapiens
tgtgtgttatgatgaggcattgggcaagtcacatcagagtgaacagactawgaatggttgggcagaaaaagccttcagtccccaagccccagctgcacttt

SEQ ID NO: 586 - DNA, 101 bp, Homo sapiens
gacagtttccatatgtgcagcagcaattactgctctgttaccatcagatcrtcttaatcctattgactgaaatgccaaagtaatactattaatttactaca

SEQ ID NO: 587 - DNA, 101 bp, Homo sapiens
agatctggtgactgggcccctccgacatggccaggtaggtgagtcatgtayagtataaaggattatactattgttaattgttggtgacagttttgtaatcc

SEQ ID NO: 588 - DNA, 101 bp, Homo sapiens
ctattattcaaagtgttctgctctttttgcctttaagttaaacatcatgartttctacgcactgataaatccaaatctaataaattcctgatgtgtttcct

SEQ ID NO: 589 - DNA, 101 bp, Homo sapiens
tctgtccctttgttcctgcagccccttttcttctctctgttgcttctgcarttcctcatgtacagttccttgtgttaaacctcttcttgaaatatcttgaa

SEQ ID NO: 590 - DNA, 101 bp, Homo sapiens
ggttttccaaattgggctttgttcagattggaatgggaaaatgccaccacrtcagaggagaatgccaccttcacctttttctttgaaagttataagcttac

SEQ ID NO: 591 - DNA, 101 bp, Homo sapiens
caggtatgactccttggatttgtccccagcccaagtccgtggcttcatatytgggttcagcaacaagctagcagcaggctgtgtgggtagaatgggaagtt

SEQ ID NO: 592 - DNA, 101 bp, Homo sapiens
tttatgtaattctcaccataaccctttctctatttgtagacataggaactraggcttaaataatcaccttgattaatgtgaaatgcctacatgtactacat

SEQ ID NO: 593 - DNA, 101 bp, Homo sapiens
aagactataagcataaaattaaggttctttgagaaaataacccatatcagwcatccagagttacagccatattaacagattcacaagctctggccagtagt

SEQ ID NO: 594 - DNA, 101 bp, Homo sapiens
taatttttccaattagtaaagcatcagtactactggccagagcttgtgaayctgttaatatggctgtaactctggatgactgatatgggttattttctcaa

SEQ ID NO: 595 - DNA, 101 bp, Homo sapiens
cattccaaaaatccaaacaagatggcaccagaagtcccaggcatcacatcsaagtatagcaatgtccagaagaggaccaagtaccttttccagtagctcac

SEQ ID NO: 596 - DNA, 101 bp, Homo sapiens
ataaattttaaggaaatttaaagccacccttgaatttgagaccaggttttyattacttgtgtctttctactaacaaaagcatcttaactgctaccccatgt

SEQ ID NO: 597 - DNA, 101 bp, Homo sapiens
gattgtgaagattttattgttcacacacacctgtagtagaattcggccttsatttgcaaaccttagaggtaataatgatgaccttgataataattttgagg

SEQ ID NO: 598 - DNA, 101 bp, Homo sapiens
ggggggcattcaaagccctccggacttcattctgccctaattggaagtcaytgtggaatgaagtccagtatttaatttggcctgtgtttgacagatccgat

SEQ ID NO: 599 - DNA, 101 bp, Homo sapiens
cccatcctcctggtctccaagagttagctaaggatgagatgaaacactagrtatgaggtaaatgaaacttggataaaattcctgatgttgctattatctgt

SEQ ID NO: 600 - DNA, 101 bp, Homo sapiens
taggagcccaaccaatatttcttaattgaagtaaggataaaatggtaaaamgtgtgttaagatatagagaatttatgtcctgtatcacttgtttttataaa

SEQ ID NO: 601 - DNA, 101 bp, Homo sapiens
cgctcttaacggttctttagttcaagacaagggcttctgtgtgtcttttcrtcgtggcatattcccaggattggacttagccagcaatttacccatggctg

SEQ ID NO: 602 - DNA, 101 bp, Homo sapiens
ggcacagcactgcaccacgccttaggggagattggactctgggcagagatyccaagagaagcaggagttggagtcttgggggccagtgtgatagggaacta

SEQ ID NO: 603 - DNA, 101 bp, Homo sapiens
tatacacggaatcccatatttaaaaaccactgttcttaactacggttatgraatcctgaagaggggcagcggtgagaaaagaaaatctggatgcttctgtg

SEQ ID NO: 604 - DNA, 101 bp, Homo sapiens
gctgcctataaaaccttttgtgggaaatgttttaaaaattaagcaccaagsgttagtgtgcctcaagataagggtaaatttgaccttaagggttttgtaag

SEQ ID NO: 605 - DNA, 101 bp, Homo sapiens
ctagcagaatcccttctttctcagaaatcctagcgctcatttaactcacaractgtaatacaacagtggcagcaagagatggtttctattcatggagtact

SEQ ID NO: 606 - DNA, 101 bp, Homo sapiens
aaatggtgtcaccacatgagtcctgaagaatgctaattatataatagttaygtatccacttgttcagtttggaatattctcatcagcccaacaatcaagta

SEQ ID NO: 607 - DNA, 101 bp, Homo sapiens
cagcctggtctatcacttaggattaggattgtgatactaatggcggattaygtaataaactcaactatattggcttcatcaaaggggtttttcacacaaga

SEQ ID NO: 608 - DNA, 101 bp, Homo sapiens
tctacaaaatatgatttgatttgtaaagctcttgtttcagattgtgtcggycacaggtattcccctaggaaagtcggacccgaggtttggttaagcagctt

SEQ ID NO: 609 - DNA, 101 bp, Homo sapiens
ctaccttcctgctaaacccttcgacactgccgcttgactggctggagtcgycgtagtttttaaatgaaggctggaaactggcattggcagcactgcctaat

SEQ ID NO: 610 - DNA, 101 bp, Homo sapiens
agtattaggaccaaatttgtcatgtatatccacacaatttgcatgcgaaayggtgcttcctaccaaaagaaaaagagaattgtcttcctcagtcctttatc

SEQ ID NO: 611 - DNA, 101 bp, Homo sapiens
caaaaagctgagaaaggaaacctcagtaagatagaagacacactttataayagggcaagctgcaatgaaaaattcacactggaaacctcagtaggaagtaa

SEQ ID NO: 612 - DNA, 101 bp, Homo sapiens
tacaaaaaccgtccttgagaccgatgttctttaaatattgctatcatttgyaaaactggttaaaaatgtctgctgtattgtggccttaatccaaagaccca

SEQ ID NO: 613 - DNA, 101 bp, Homo sapiens
gaaaatccgttttattcttgtggcattgaagaattacaagctggatggtartatagttctaggtgagtcaaacttcattgagcaacttacccaggaatact

SEQ ID NO: 614 - DNA, 101 bp, Homo sapiens
tgagatggagggtgatcttgacgaaggcctcactttcctttctcgttaacyatgaagcagaaactatattcatcagtttccatgctagagaaattttgaac

SEQ ID NO: 615 - DNA, 101 bp, Homo sapiens
aagatataatggaaaagttacctgcttgtcatgagtatcctgactcattargtggactcattaggtccagtagactaagtggaaaattcaatctctagatt

SEQ ID NO: 616 - DNA, 101 bp, Homo sapiens
gaacttgagcaaaaatgaggaaaatagctaggtttctggttctgaatgttktttcaaatggctttctgctgtcagagaacactaaatgaactcccctgaga

SEQ ID NO: 617 - DNA, 101 bp, Homo sapiens
tggctctcagaagcctgttgctgtcaaaggcagctgagtacctaatgtgtrttattcaaacaaacaaacaaacaaacaaaaagtgaagctcctagcaattg

SEQ ID NO: 618 - DNA, 101 bp, Homo sapiens
ccactacttcagagtgagaaaatatgttcagtatctggcacagagtaggtrttgatgaactctgagtttctctccggactcatccttgttttgccaagagt

SEQ ID NO: 619 - DNA, 101 bp, Homo sapiens
tttattttaagaattgaaggatcatttatatcaggatattttagcattgaytattataacctgataaagggaaaaaagtttgattgttatcaataaatgct

SEQ ID NO: 620 - DNA, 101 bp, Homo sapiens
cagggagatgcacatgtaagtgtgttcgttacctgttatttatttagctaycaattttaactattgataaatgtaactgtggataagttcctaagaagtaa

SEQ ID NO: 621 - DNA, 101 bp, Homo sapiens
agtagatgtttaaataaaaggtaaacagaattatagttgaactgacctcargaatcaaaatactaatgacaaagtaataaaacaagaaaataaagccaaag

SEQ ID NO: 622 - DNA, 101 bp, Homo sapiens
attaaataacttataaatgagggtctattgaatagttattggcctgaatgwctaaatgactgaaagggtactcttagaacctggatatttaggaagggtca

SEQ ID NO: 623 - DNA, 101 bp, Homo sapiens
ttatttcatctcaactttcactatcagatttagttaaatgtccttttctgwccgagcactcctgctattttacttacatggaagcttctcacatctctgtc

SEQ ID NO: 624 - DNA, 101 bp, Homo sapiens
tggaagcttgtatagtcaaaaggtgctgagaatacattgtggtcaagtgtytgcttctagtgcttcaaagaatctggcaatctgagatatctatgatattt

SEQ ID NO: 625 - DNA, 101 bp, Homo sapiens
atggcaagcatccaactgtatttaactattgattatctcttatcattggtkgttatcctaaattttgcttaatgtctatttccctcagtagactataagct

SEQ ID NO: 626 - DNA, 101 bp, Homo sapiens
ctatcttaactcttcagttctttgccatatctactacttgggacaactgtwacttttctatcccataagatacaagttgggccattatattatatggttgt

SEQ ID NO: 627 - DNA, 101 bp, Homo sapiens
tctagaaggcatcattggaatagtcatgctcagccactgatagatcctcasattcattccctgatacgtggaataaaggcaattacggtaggaaaggccac

SEQ ID NO: 628 - DNA, 101 bp, Homo sapiens
tgagattctagagtctgaacctacactcacttttactcttccattaattgygtctcttttctatttacctaaccattgttaccagatcgctaatactgaca

SEQ ID NO: 629 - DNA, 101 bp, Homo sapiens
ttgtaatgtagtaatggttcttttcagttctcttatatgcaaaaaggtcasaacctccatgttagttatttctagaactctacagacacatcatcaaccta

SEQ ID NO: 630 - DNA, 101 bp, Homo sapiens
cacccttcagccgctgccctgacccggccagcagctgcgaaacccgtccamgcgaaattgagttcttggctgggcccgtgcctcgtgctccggacctggga

SEQ ID NO: 631 - DNA, 101 bp, Homo sapiens
gtccctgcctgagcctgtgaaccaagtgaagagggcagtcggaccgattcracattgacctctgctcttagatcagggcgttctcgtatgaaatcccattt

SEQ ID NO: 632 - DNA, 101 bp, Homo sapiens
gattcttgtacttaaaatgtagttccagaattcactctttcacttattaarcattgactgtgtactagacccagtgctgagtactggggatgcaaagacac

SEQ ID NO: 633 - DNA, 101 bp, Homo sapiens
taggaaataaaaataagtttatagacataataaatttctaacttgatttaytagtagcatacaattatagaagtacaattcagagtcatctattcaacagt

SEQ ID NO: 634 - DNA, 101 bp, Homo sapiens
actgtattctagcctaggcaacaaaacaaaacaaaactcatagaagatgtrggaagttaatctgaaaaataaacatatataaaataaaatcactgctcagc

SEQ ID NO: 635 - DNA, 101 bp, Homo sapiens
gagggggtagaagtcggggctgatgagccatttgcccacgtcctacattcrcagacagaaaagagactgcttttgatatttgaaggtggggacatggatat

SEQ ID NO: 636 - DNA, 101 bp, Homo sapiens
cagaaccccttgaatgaaggggaggctgggtccccttaaggaaggaccttrctacactactaacaatttatgctgttaatctttctcccatccttccccaa

SEQ ID NO: 637 - DNA, 101 bp, Homo sapiens
gatgttttggccagaaattagctactctgccccatctccctaaatttcgawctttgaattctctccatttgaactttgtattacttttgtgtttgtgatct

SEQ ID NO: 638 - DNA, 101 bp, Homo sapiens
ttttagataagtttctctgagactaaaagacgtttctaaaataaagcattkggacaagacagtctctaaatttgtgtccaaatcttgcctttggaattcca

SEQ ID NO: 639 - DNA, 101 bp, Homo sapiens
tttacttcaactctcgtttatgtatttgggttctcccttggccttggtaawagtcttatttgtatctggactgtgattctatgctagctccctcaaggctc

SEQ ID NO: 640 - DNA, 101 bp, Homo sapiens
tcatgctgatatatgctactttgtattaattatttccaataacattaactraattcttactacattccaggccttgaactagatgctgaaggtgcaggcat

SEQ ID NO: 641 - DNA, 101 bp, Homo sapiens
tccaaaactgaaaaacatgatatgatatgtcttaaaagcaagatcattacygtgtttttgagtttgggaaagaaggaaggtagaaatcccagtgtaggaaa

SEQ ID NO: 642 - DNA, 101 bp, Homo sapiens
aggggccccttctctgtggatggacaagcctaggctaagtacaactggackcatgggacacactgtggggctatgctccagaaaagggaccctatctccct

SEQ ID NO: 643 - DNA, 101 bp, Homo sapiens
actccaattatccattgttccctaaggcactaagaacacattatacaaatraagtaaagttaccatgtaataatataagaagcagacagaaataaaatagt

SEQ ID NO: 644 - DNA, 101 bp, Homo sapiens
gggagatcaaaatatcaaaaaggagaaagcaagtaagagtagaactgattmattttttgttaaaatttaactttatagacaactattttgaaaatgttgct

SEQ ID NO: 645 - DNA, 101 bp, Homo sapiens
actcttgcactcagggtttataactcggtgaagagttaaatttgatctacrtagtttcatttgattaaaataattttacataatagtgggggagttgaaat

SEQ ID NO: 646 - DNA, 101 bp, Homo sapiens
tgggataagaactaggccaacgcaccctttactgtccgccatcactagccyatatcactcctcactgccttctcagtgttcccttcatggccgaaacaaat

SEQ ID NO: 647 - DNA, 101 bp, Homo sapiens
catgataactaactagcaaatcatagcattgttttacaggaatattctcayatcttaggagatctttcacatctctgcacagaggtatcagagtggtgcct

SEQ ID NO: 648 - DNA, 101 bp, Homo sapiens
ggctatgcctaggccacatattcttgtctttgatgtcaggtatgggaataragatgactacccttctttcacttccttagtgaaaggagcacactgtgtcc

SEQ ID NO: 649 - DNA, 101 bp, Homo sapiens
tttgcttttcagtttcgtcatttcaaaaattgacattataataaatagtayctatgttacaaagttttttgtgtggaataaatgagatactgcatataagg

SEQ ID NO: 650 - DNA, 101 bp, Homo sapiens
tacaaatgcatcatttaactggcataaacaaggtatggtgatgtcaatttytgctttgaacaaaaggaagggaaagtgtttttctttcacttaaggccaca

SEQ ID NO: 651 - DNA, 101 bp, Homo sapiens
cggtgtctgttgttcccctctttgtgtccataggtactcaatgtttaactmcaacttatgaatgaaaacaggcagcctaaagatgtatagggcttctatgg

SEQ ID NO: 652 - DNA, 101 bp, Homo sapiens
gctgactagaccagatgagctatcctttggacttgtgagcttaataaatgytggtgtattgagatgttatggttggttctttatgcagcattatttggttt

SEQ ID NO: 653 - DNA, 101 bp, Homo sapiens
ccttacttactgcttttatcatattttaggtgactcagtcctgtagaactwgcaatttcaaattatagtcaattttctttagacatataaaattaaaattg

SEQ ID NO: 654 - DNA, 101 bp, Homo sapiens
attaagcacggcttatttttagctattctaagtaatatagtgttctaagaygctagtaacatgcttggcctataaggtataaaaatatgaattgaatgact

SEQ ID NO: 655 - DNA, 101 bp, Homo sapiens
atagaaagaatcaacaaacaaacaaataaacttgatactaacttctgactsctaaaccatagttctcatctctctttactccttgaagttaacaattctgc

SEQ ID NO: 656 - DNA, 101 bp, Homo sapiens
catatattcagatgtcaatgaatcgaattaaccaaaaatagcagtaactcrtattaattcaaaggttcaaatcaagtttgaattggtaaataggaagttac

SEQ ID NO: 657 - DNA, 101 bp, Homo sapiens
gctattccctggcccaaattccttctgctattaatctgtatatttgtgtcragccaagattcttaggtagtactgacataacaaatcactgaccttttatt

SEQ ID NO: 658 - DNA, 101 bp, Homo sapiens
gcctgattcaaagaaagtgctcaataaatgttagctactgttattagctgrttattccaagtgcttggtaagttgctatatattagtcatgttagagggaa

SEQ ID NO: 659 - DNA, 101 bp, Homo sapiens
tgttggtagcccttagatattgctcattgtcttttaatataatttgaggcytagggagtcattaggtaccactgtttacatcaccaactgtatgatcagaa

SEQ ID NO: 660 - DNA, 101 bp, Homo sapiens
cttccgcactgattaatttatgcagtctttcactcactcaacacatacttrtcaggccttattatctacttaaacttgatgcaagcctgcaaatcagagag

SEQ ID NO: 661 - DNA, 101 bp, Homo sapiens
taaatgagaggacctaagtaagtagaatgaaagcctaattggttacaagasaggaagggactcatttccactggcaattgaaggaagcttccatagatgga

SEQ ID NO: 662 - DNA, 101 bp, Homo sapiens
gataaactgtctctcactttctttcccccacagcttgtcttaagaacaacrgtgtaaccattagtgaaaaatcctttcaggctagtaaaatgtaaaaagag

SEQ ID NO: 663 - DNA, 101 bp, Homo sapiens
ttgatgatggtatgtgatgttctataagttatagttagtaagcatgttttkaggatatttttctgctctccaaagagacacaattccggaagatatttact

SEQ ID NO: 664 - DNA, 101 bp, Homo sapiens
gttccagtggcatctaaaaataagctctttcacagtccttatgtgtcttawatatcattatggtatttattttgttcaaatctttgcagtcacctcaaatt

SEQ ID NO: 665 - DNA, 101 bp, Homo sapiens
tttatctacttccatggtattactggctgatgacctttaaaccaatgacaytgaccttgtttcaagcactagtctcctatcaacaactgcctatgcaatcc

SEQ ID NO: 666 - DNA, 101 bp, Homo sapiens
ttctctgttaatagcatcatccatcctcagtttattccaataagcttgtamaaatatttcttaggtgtttatgtcccaagaactgttctatgtacttcata

SEQ ID NO: 667 - DNA, 101 bp, Homo sapiens
ttggggtgatgagattagatcatgtgaggtaaaaattcagaaaaaaagcartatgtaaactaattaggagtctgaatacagagtatacttctactcaactc

SEQ ID NO: 668 - DNA, 101 bp, Homo sapiens
cattgttcttgagaccacagtaatggccaatacagttttgaatgaagatayggctttttgtggaagaaggaattgaaaagtttttttttaattagcagact

SEQ ID NO: 669 - DNA, 101 bp, Homo sapiens
atgctggcaccggtaaatataagaaagcaaaaaccaaaaccatgatatttrcaagagcatacactttaattggctataataatgccaaattgtgataacgc

SEQ ID NO: 670 - DNA, 101 bp, Homo sapiens
acaaagttaactgaactcttttctcacctgaggcatttgcagttttcaacrgtagtggcttgtcctcttctggctcttgctgttattttgattattctttc

SEQ ID NO: 671 - DNA, 101 bp, Homo sapiens
gctaaccacagtgtaagtgccaaagcacaccctggtctttccacaggaatmattgggaaatattaaataacactagtcacaatgcagtagcagcaaagctg

SEQ ID NO: 672 - DNA, 101 bp, Homo sapiens
taagccacatctgaaatgaattgaaagtttaaaaggccacataataacatygatcagtatacatgcttttcttgttgaaagataatcagatgccagaaggg

SEQ ID NO: 673 - DNA, 101 bp, Homo sapiens
aaccatttgatgccttaaatcacatgctcttgacccagaagtttctaagtktaagaatagcaaatgaatctttttcttttcaggtgggggtacacactctt

SEQ ID NO: 674 - DNA, 101 bp, Homo sapiens
ttatgttggctttaaatatctgcttccatttaattcaatgtgaggaattakgctaggtttcatggaggaataaaaagatgaatcagatggaagacatcaag

SEQ ID NO: 675 - DNA, 101 bp, Homo sapiens
ggcgtcactgtattatcagcctttttacacaatttgcctgactgtaaatcrgaggtttaaaagtacaagaaaatctcctatttgatttaatgactggttga

SEQ ID NO: 676 - DNA, 101 bp, Homo sapiens
cagaagccagttttaaatattacattccctgttaggattccgactgcttcstattgctaagcttgaaggggcaatgagattgaacatggaaatggaggctg

SEQ ID NO: 677 - DNA, 101 bp, Homo sapiens
ctcatgtgctcttttagcatattaattgtcccaacaaccatatagcacaargtatttttaatttacattttacagatgaaaaagcagagattttaaaagag

SEQ ID NO: 678 - DNA, 101 bp, Homo sapiens
gccctactctagacattcaaatagtaaacaacaaggttcaattcaaatccmgttctctgggtacattttttggtaatattctcagtatagtcagtcatctt

SEQ ID NO: 679 - DNA, 101 bp, Homo sapiens
accatatcactaaccaatgctaatattaaacaatactcaatggtactgaartatatctcttgtggtgattgggtttttgttgttatattgcagaattgtat

SEQ ID NO: 680 - DNA, 101 bp, Homo sapiens
ctcaaaattgagaggctgaccaaaaggaggaaatagttaattaaatttgcyctaacgctgtgtctgtgtacagcaaattttaacctaacttagtatgtaaa

SEQ ID NO: 681 - DNA, 101 bp, Homo sapiens
agtgagtttttcttccttctaggtgccctttcacttcttatcttgaacagrgatctgagttgttcagagaggcgagagaaagtgaagtaggtaaaattata

SEQ ID NO: 682 - DNA, 101 bp, Homo sapiens
taatattaacatacaaccaaacccatctgagaggttcactacaaaaaagakgatgcataagagaaaaatagccctgaatgggaggttgttacattccctgt

SEQ ID NO: 683 - DNA, 101 bp, Homo sapiens
aaagggccatttttaggctaccattatccaggatgaatcatccccaatcaytttgcacatttgtgttgtgtgtccccacagaagatataaattcccaggaa

SEQ ID NO: 684 - DNA, 101 bp, Homo sapiens
tgcagccagatctcgcattcacctttcatgattctttaaaagattacaccstatcaattcatttagaaggaaacttacaactaatgtgatggatttttctt

SEQ ID NO: 685 - DNA, 101 bp, Homo sapiens
agagactgtgaaactttaggttaactacttctgtctgttgctgaaaatacrttcatttgagctatcctatcttttcattctttttgagatttacttgaaat

SEQ ID NO: 686 - DNA, 101 bp, Homo sapiens
gttattatttaccgtataggcatttaaattaagtggtattgggagaacttkacaaatttgttctaatgttcatctagaaaagtatccctaaattcaaatgt

SEQ ID NO: 687 - DNA, 81 bp, Homo sapiens
aatatacagcacacaatcaatttgatagatgaagaagcagaaaatgtgacmataacttgagaaaatagtcaatagaaatag

SEQ ID NO: 688 - DNA, 101 bp, Homo sapiens
ccagtggcaataacgtttaaatgctgaaggaaatatcttttggtttgctgmgagttttaattagggttcactttgctgctaagacagcagcatttaagcta

SEQ ID NO: 689 - DNA, 101 bp, Homo sapiens
atgcactatcaataagctttaaaaaaaatcaaagtagactcagcaattttwaaaattatttatttatttatttttagactagtcaagtgcagtagtaaggg

SEQ ID NO: 690 - DNA, 101 bp, Homo sapiens
tttaacattatttagggtctaaaactacgaatgcatttgttttgatttctsaagtttgacgtgttgaagctgtttcaggtagtaaataaaaacaggagcta

SEQ ID NO: 691 - DNA, 101 bp, Homo sapiens
aacagagaacctgaggatccatgcaaactgaaaaatccaaaatcaataaastatctactcataaacaaaatgagactaatccaattagaaaaaaagtcaga

SEQ ID NO: 692 - DNA, 101 bp, Homo sapiens
gcagataactgctaattccttccaaattagctaattcccatagtcacatakgaaagtaggaacacggggatatacaaataaaaatgtatcaggagttacca

SEQ ID NO: 693 - DNA, 101 bp, Homo sapiens
ctgaaggatcttcctgtagctgtactgaaaatggcagaggctgtctctttygctagaatcggagttgtaaactggcagctcggagaaccatccaactcaag

SEQ ID NO: 694 - DNA, 101 bp, Homo sapiens
ttttcctcgtccctaacagaattaggctgattgagtcagaaggaaatagayaacatgataagtatgttgagaaacaagttggggctacagaatttccagat

SEQ ID NO: 695 - DNA, 101 bp, Homo sapiens
gcttgagcccaggagtttgagaccagcctgggcaaaatagcacgatctcaytcctacaaaaataaaaaattagctgggcattgtgatgcatacctgtagtt

SEQ ID NO: 696 - DNA, 101 bp, Homo sapiens
aataaaaataaaaagctctttcattttgcaaagataatgctatttacttayatgcattttaactatgtattttaaaaaagatttgtactaaaagagaaaac

SEQ ID NO: 697 - DNA, 101 bp, Homo sapiens
ggtattggtgcatactctgagaaagacatctcagagcacttctgccgtcarttacgaagtttcaatataagaattctttctacacatgcctgcctgtcttt

SEQ ID NO: 698 - DNA, 101 bp, Homo sapiens
taatgttttttaggtctaggcttaattctcctgacaacagtaccacctacmtagcagaatgcatgaagagttcactctggatacaaagtaaacaacatgga

SEQ ID NO: 699 - DNA, 101 bp, Homo sapiens
atgtctttaatgtttttctgcataagaagacaacttctctgagcatacagyttttgaataacagccatttaccacacatgcacaaaaatgttgactatatc

SEQ ID NO: 700 - DNA, 101 bp, Homo sapiens
ttgaaaattttttcttccaaataattttctttgaaggacaaaatcaaccartgagggcaaacacactgtctttgagtaattctagaaggtcacagagtcct

SEQ ID NO: 701 - DNA, 101 bp, Homo sapiens
ccccactggcctccattttgattggctagtgaccctgccatgttactacakattttgaatatcatctcaacctggaaggatactgagggatgcatataaga

SEQ ID NO: 702 - DNA, 101 bp, Homo sapiens
aaacaaacaaaaaacaaacaaacaaacaaaaaaccaatcacttagaatgasattgtgtaaagttttaaatatcttcctaagggggttggactttggacttt

SEQ ID NO: 703 - DNA, 101 bp, Homo sapiens
tttctttaacatttttatggcctttctccatttcctaacactagacgtctyaacaatatattccaaaatatttaccatgaactcagtcaattttgagattg

SEQ ID NO: 704 - DNA, 101 bp, Homo sapiens
aataaaatctttattgagatataattaatataccataacattaacgtaaartgtacgattcaatggcttttaacatatccacacaattgtataaccattac

SEQ ID NO: 705 - DNA, 101 bp, Homo sapiens
ctatagctgccatacacagcgattcatttgatggatgtgggcaaagttagygaaaaatcttccgggaagaattcaccattctatatgtgattaagaacatt

SEQ ID NO: 706 - DNA, 101 bp, Homo sapiens
cttgtaattctcatcattctaatacatgtttgttgttttatagttttcaasagtgagcatgtaccatattttgctcatacattcctaggagaaagggtaca

SEQ ID NO: 707 - DNA, 101 bp, Homo sapiens
caaattacacgtcatgttccccactcctaccacatggtggaaggaaattayttttgaatgcagaagacatcagagttatagttcctcaatttaaaatgaga

SEQ ID NO: 708 - DNA, 101 bp, Homo sapiens
taagaaaaatatgggtagctaagcctcaatggtgaatccatttagagggamgctatagattttagtatctgtagatatttttaaggagaattttctctgta

SEQ ID NO: 709 - DNA, 101 bp, Homo sapiens
ttcaaactattgttggtatctgttaactgttcctttgttactttaacttcrtctatgctacttttggggaataatcctctactctctttcaatccactaat

SEQ ID NO: 710 - DNA, 101 bp, Homo sapiens
tattgtcaaaattgctgttattaagtatctactgtgtgccaggcactttarataaatattgtgtctaatcttcaaaacaaatttgcaaggaaggtttttgg

SEQ ID NO: 711 - DNA, 101 bp, Homo sapiens
aagacagtgtagagtcttgctcaatgggtttgggaaatccagcccatagayttgcctatcatccacgactgccttggtagctcatctaaatttgaatgggt

SEQ ID NO: 712 - DNA, 101 bp, Homo sapiens
ggcctctctctccatatctttcaacaccagctcagcacttgagtctcggargcaactttgccagcaaatgagaatgtacaaattaaaatgtcatgtgattc

SEQ ID NO: 713 - DNA, 101 bp, Homo sapiens
aagcaacaggaaatagcatgcagaaaagattctttctgatgtagattaagygtactattggaggcagagccttttcacagactgttttaggaagctgtttt

SEQ ID NO: 714 - DNA, 101 bp, Homo sapiens
actattaaatatttaaattttaagtacctctttctcaactggtcctccacratctccaattcttcattaaagtcctttatataaatggagatgaatccaat

SEQ ID NO: 715 - DNA, 101 bp, Homo sapiens
tcatctagaggggctgttaaaatgcagacttctaggccccgcccctgagartctttagttaagtaggtcaggggtagagcctgagaatttgcattttgaac

SEQ ID NO: 716 - DNA, 101 bp, Homo sapiens
tagaggaaagtccagatttcttcacagggcatagctcttgataatccttcktctacttacttggccaacttcatctccagtatattttcacccagtcactt

SEQ ID NO: 717 - DNA, 101 bp, Homo sapiens
cccattggttcacacagcttggtcttgagctgtggtgtcttctaccatgayataaaaagcctcatgcagtccctctactcagctcctttccacttctctgc

SEQ ID NO: 718 - DNA, 101 bp, Homo sapiens
catagagaaaggccatttctttctaattgaagtagctagaaatctaataaycaatgtctaaagagatctatccaattaagctttaagttgagttcatcttg

SEQ ID NO: 719 - DNA, 101 bp, Homo sapiens
gtgatgaaaggggattttttgaaaaatctagagaagtagcatatggaaaaytataatgtgtcttttttacaatgacttcagctctgtttttagctagaaac

SEQ ID NO: 720 - DNA, 101 bp, Homo sapiens
aaagaaattactagctaggcaatcacttaacgtttataaacactaggcacrtgaaacaacctgcatatgaaataattagaattcacaggtcagaccgagca

SEQ ID NO: 721 - DNA, 101 bp, Homo sapiens
tacagaagaaaattgaatggcgagggtgtggccatatgaactgactagatrgctaatatggacactttgggtatttctaatgcctgttcagggctggtttt

SEQ ID NO: 722 - DNA, 101 bp, Homo sapiens
gtggtaagaagtcccaaaaaacttgaatatagggcatgtgaggaaatatcwagtcaaataagaaaagcaggtggataccttcatgacaatcacaatgccta

SEQ ID NO: 723 - DNA, 101 bp, Homo sapiens
aagcaatttttcctgacagcccagaaaacaatataagtaaactacttatgragattatagtgtactcccagggtgttttgagcaatctgaatgagtaatag

SEQ ID NO: 724 - DNA, 101 bp, Homo sapiens
ttatcaccctgtaaatttttatcagtcttagctgctccaaattagttataracatgtagcactgatatgagcacgtaagaatttgtgatatacaatatatt

SEQ ID NO: 725 - DNA, 101 bp, Homo sapiens
atatttaattcaaaatatttttacatttctctggaaacttcttatttgatycatgtgttacttagaagttttttttaaaaacaacaacaacaacaaacata

SEQ ID NO: 726 - DNA, 101 bp, Homo sapiens
ttttgcttttgtcacaatcctataacaacccagacaacaaatcgtagtgamctttcccaacataaatggatgctcttggtaaggtagcagtttcctttatt

SEQ ID NO: 727 - DNA, 101 bp, Homo sapiens
tgtgttctaacaactgaccttagaacatcatgataaaacggcatgtggagytaaccttttagctgaattatgttgtattccaacaccctgctgatcagaag

SEQ ID NO: 728 - DNA, 101 bp, Homo sapiens
aagcagaagtgctcctggatgtttccactatctagacaaaaaatttcaacrcatcagtcccagcaagtttagttacatccctgactgctgtaggtgatgag

SEQ ID NO: 729 - DNA, 101 bp, Homo sapiens
atgtctttatcagcagcatgagaaaggactaatatactaagagtttagctmatttgagaagataggcttaaaaggagcttatgtgctttgcatcacatgtg

SEQ ID NO: 730 - DNA, 101 bp, Homo sapiens
taaatatttaactttttagtcaggataaaagcacaagtctgtcctaactakagtagtattaaaatgtgactattttattttttcttcataaaggaaaacaa

SEQ ID NO: 731 - DNA, 101 bp, Homo sapiens
tttttcctcccttaggatattgggtgcagaaagttaagccaatcctaacaytcagcttgcaatcattctgacgtaacatagtagctgtctcacgagtccgt

SEQ ID NO: 732 - DNA, 101 bp, Homo sapiens
cactgccccaactactgccttttctgtaggattgtcttctctgtgcaaccrttaaacatccttgcacctcagaggtctgtccttccagaggtcaaagtacc

SEQ ID NO: 733 - DNA, 101 bp, Homo sapiens
catgaatacataagcatatattgtattggctgttaaagaataaggcacgtracattttagtattattctgagaattatttaaagctcatagactccctcaa

SEQ ID NO: 734 - DNA, 101 bp, Homo sapiens
taaattaatataaaggttatttgtttcactcatagtgttgattgacatatrgtatacaggtatcctatgagagaaacatgtaacttttgtaacatatgact

SEQ ID NO: 735 - DNA, 101 bp, Homo sapiens
tgacatatagtatacaggtatcctatgagagaaacatgtaacttttgtaayatatgacttaggagtgaagtgatttcagttctaatttgagaaatgaggga

SEQ ID NO: 736 - DNA, 101 bp, Homo sapiens
aggcagatatgttgatatcagagcttgtggatttatacccaaatagacaartttcatgaaaggacagctgagagagtgaatgtagccggatggaatactgc

SEQ ID NO: 737 - DNA, 101 bp, Homo sapiens
cagaggaagggcaaatctttgctggaaaaagatatcatcatcggagcctcyacatttttaaatacacattttatatgtattcctgcattcagaaaattact

SEQ ID NO: 738 - DNA, 101 bp, Homo sapiens
atagtatagtgctggtagaactcttaaagggcatccagctcaaccacttgrctttacagggaacacagtggagacctggagggttgaatgatattgttgct

SEQ ID NO: 739 - DNA, 101 bp, Homo sapiens
cccatccagctttccacaacacttcccatgctttgtctctgactatgagcraagaactacaccctccccttagctataaaacatataccattaatctttac

SEQ ID NO: 740 - DNA, 101 bp, Homo sapiens
ttaatattgataaattagtcatttaacattaaaagtggttatgattagaaygagtatcactgattaagcttccatttactctgttgctctgtactgaaagc

SEQ ID NO: 741 - DNA, 101 bp, Homo sapiens
acaaaaacacggggaaactaagatgtttataggatcagaagaaatggaaayattaaacaacaaaaaaaggttcatgggtaaaagctttcatattctatatt

SEQ ID NO: 742 - DNA, 101 bp, Homo sapiens
cttggtaaattctagctgcccgttattaccattattatgtttgcatacctrgatctcaatggattaccagcagcagaggttaaaaaattgagtcctaggcc

SEQ ID NO: 743 - DNA, 101 bp, Homo sapiens
cttagctttcatctttcattgcagtgtagtttcttcagggagatagatatrtttacacttagtaattatgagcctaattatgttttaaagcacaggaggca

SEQ ID NO: 744 - DNA, 101 bp, Homo sapiens
tatcaattaaactatttgattgtcttattaaattccaaaaataaacatacrgtaacacttaaacagtatcaagcttgtagctgtgcatggagttcttgcta

SEQ ID NO: 745 - DNA, 101 bp, Homo sapiens
atttgctttcaggaggtgtttcaatcttctaacggcagagctagaagatcrgttcaccagacatgcccaatatatacaaagggtagaaaacatcacattat

SEQ ID NO: 746 - DNA, 101 bp, Homo sapiens
acttcacacatgaatatgaataccatcccacagaaacatattgcttgtacmctgaatgattcccatactaagccttcaattcacttttttagtcaaggagt

SEQ ID NO: 747 - DNA, 101 bp, Homo sapiens
tatgctttcatcttaatgcattccacttcactgatgctgagcagccctacrttgaaaaggattctaaagggaaagtgctaggcctagaggttgcctgaggc

SEQ ID NO: 748 - DNA, 101 bp, Homo sapiens
aaaaattaaaaaaaaaaagctgagtggtagagagaagccaagacaaggtayggatttggttcagagtcatttcctgcacctccattcacccactgcactcc

SEQ ID NO: 749 - DNA, 101 bp, Homo sapiens
acacctggcttgtagctgaatattggtagaaaggttgacagtgtactgaaygatgcaggctatcttcacccaacttgttaactctcctgtgttcatctgtg

SEQ ID NO: 750 - DNA, 101 bp, Homo sapiens
atatttactgcaattgtctgtcatggtttccttattatatttaggattttrgaagagtccatgggtcttaaaatcaagaagattcacatccagaactaata

SEQ ID NO: 751 - DNA, 101 bp, Homo sapiens
tatatttacatagacaattgtttttaagtgacagcaggtatgaatttaaaragaatggacattgaaaaagaacaaagtcacagtttgagatgtattggtta

SEQ ID NO: 752 - DNA, 101 bp, Homo sapiens
aataggttagatgaagaattagcactaataatgaaaagacaaaaccctcgmtgggccacttctcaaaatcataatttggtcagtcttgctgcccagttgtc

SEQ ID NO: 753 - DNA, 101 bp, Homo sapiens
ccttatgaaactgacaatatgttaaaatgggtttgtggaacaacttctacrttagaatattatattatagaaacgttgaaaaacaccatcatgttcagtaa

SEQ ID NO: 754 - DNA, 101 bp, Homo sapiens
gattgttgcctttggccaaactcagcgattgtgaatgacatctcctgctcrgttcatgtaacgtacaggagacctgttcttagcatttaccattatccttc

SEQ ID NO: 755 - DNA, 101 bp, Homo sapiens
aattgataagcagctgtgttaataattcacaatgaatagcatatttaaaaygtcaacccagtgttgattcttatggcagtatctgaggcgagagagaccaa

SEQ ID NO: 756 - DNA, 101 bp, Homo sapiens
tttcccttaagctttcctcagcagttatctggatggtggattaagtaaccrtcagccatttgtgtgtaactcaaactcacattatcgggtcagttaacaga

SEQ ID NO: 757 - DNA, 101 bp, Homo sapiens
gtggcaggatatgctcctactctctttctgtaataaaaacgagtatttctkgtatccatttattggtttacagcaggtcattactttataaccatttcgat

SEQ ID NO: 758 - DNA, 101 bp, Homo sapiens
catttcgatcaattacacaatcaattgaacaaactcacaaatatgtatttrgtacctgatgtgtataagataatggagaggtactttataaaaggaaagga

SEQ ID NO: 759 - DNA, 101 bp, Homo sapiens
tttttgtgttataactatatttggaaatgctttgctaaatgggcttttgaktccttcacctgaataaagatgaaaaatattttcagtgttaaaaaactttt

SEQ ID NO: 760 - DNA, 101 bp, Homo sapiens
atgtggattgctccaagatgtattctggctacagcagtgaatattgattayctctattatgggaatggctaaataattagatgagtccattgggatccaac

SEQ ID NO: 761 - DNA, 101 bp, Homo sapiens
gaggttgagattgctaagtaaagaaactgggtgaggatgaagtcatttacygagatagggaacgtaggaggggaagcttgcagggctctgttatgtaaaaa

SEQ ID NO: 762 - DNA, 101 bp, Homo sapiens
aactctcatgtccagtaattaaaactgtccagggaaatcgtgtaaccagcmactaatatcagtccctgcttaattgcctttggccttataatgttgaactt

SEQ ID NO: 763 - DNA, 101 bp, Homo sapiens
catcgaaacccagccaaagcatcatttgtaaatgtctctattcatcaactsttcaggtctcttttctgtcataacacgcaccaggatatctgttgttgctt

SEQ ID NO: 764 - DNA, 101 bp, Homo sapiens
caaatacactatttattgcagaaactaccatatgttctgccttctacttascacaccgtatattggctctgctgatgtattagtttcactaagttatccat

SEQ ID NO: 765 - DNA, 101 bp, Homo sapiens
ttttatagacttaattactggttaattattgaataggtatttagtagcgtsttagcatcaccattgtgaacatatgccccttcgggagagttcaccactgt

SEQ ID NO: 766 - DNA, 101 bp, Homo sapiens
acttctggcaagtaacatgttgactcatggtgttttatcacttccttcctstggctcacgtccagtagacatgctaatgagttgccaagtcaccagtaggc

SEQ ID NO: 767 - DNA, 101 bp, Homo sapiens
acgagttcaccagtcctgggagtttccagtagggacaagaatctacaattkggactccaggtgtgagcattttctataccacactgtactaatttgtgtta

SEQ ID NO: 768 - DNA, 101 bp, Homo sapiens
tacaagtccttctttgggcatacactttcatttcccctggaaaatgcctakgagtgaacaggttgggtcatatgataaacgtttgtttaatttagaaactg

SEQ ID NO: 769 - DNA, 101 bp, Homo sapiens
cctgaggccttcagaacacgggttcttgcctgggtgtggtctgctcatttstattcatttaagaatcctgttagctgagcatggtgatatggacctgcagt

SEQ ID NO: 770 - DNA, 101 bp, Homo sapiens
ggaaagtgacataccccaaaacacaagtagactttgatgagcacagagaaygctacgaaaattcagaaaatggagagattgcttctgggggccggatcagg

SEQ ID NO: 771 - DNA, 101 bp, Homo sapiens
tatgttttcccaagctgttccaagaatttggcagggagctgacatcaactkatctgcctatacttgctttccgaataaaccactgaaatactgaagctgaa

SEQ ID NO: 772 - DNA, 101 bp, Homo sapiens
aatggacatgctgtgaactaccatttattataatattataatgcaccgggyaagagaatatgtgctttatatacagttaatatctcatttcaatttcatag

SEQ ID NO: 773 - DNA, 101 bp, Homo sapiens
ataggtttttaagaaaaggttttttaaaacatttgcaaacttatgaagccrtgaaaaaaagtcattttgtggcatgaatagtatgtagattaaagcacctt

SEQ ID NO: 774 - DNA, 101 bp, Homo sapiens
actgatgttaaaaacaattaataattacattttgcaatgaacaaaatgagwaagaatgctgtagcatctcacaccagttagaatggcgatcaataaaaagt

SEQ ID NO: 775 - DNA, 101 bp, Homo sapiens
tagggaagtcatgaacttaatgactttgggtctgtggtttgctatattcartgctttttatgtctttttaaattttacccaccctaccacactgcttctgt

SEQ ID NO: 776 - DNA, 101 bp, Homo sapiens
agatgccagccacagtagggttcctacgagtcttaatctgttgggactgcmataaaacatgacttagactgaatagtggaaacagaaatgtattttttttt

SEQ ID NO: 777 - DNA, 101 bp, Homo sapiens
aatagacaggttaaaaagtatatatattgaaaaggagctgaagtaacgcckgagataaacttcttttaaaagacaacataattcaaaataatggcaatatt

SEQ ID NO: 778 - DNA, 101 bp, Homo sapiens
tgacaagagtattcccaggaaatcctctatcattctcgtctactatgtttrtaattctaccagggattcccaaactttttctgtaaagaaacagcaaatat

SEQ ID NO: 779 - DNA, 101 bp, Homo sapiens
tctgaagcacaaagtagttgagaaactgctatttaatatatgatacttttkttctcccatcacctattccccatcattaggccagaaatttgaatttttaa

SEQ ID NO: 780 - DNA, 101 bp, Homo sapiens
cctcttacatcctttcaagttagaatatcctcctacatatgacctggttcktacttttgaatggcttttagaaatataagttactttttattaaagagtaa

SEQ ID NO: 781 - DNA, 101 bp, Homo sapiens
caggcagaaggaaaataatcccagaagaaatgcccgaggtgcttttagaayggagaacaattggtaaattcatgcgcaaatttaaataaatatttgttgtg

SEQ ID NO: 782 - DNA, 101 bp, Homo sapiens
acatgcagagatttgatatttgaaatcctatggtttgaaataaatagtttytgagcttacatttactgcaaatacccaaaggaaagaatatgaaaatcaga

SEQ ID NO: 783 - DNA, 101 bp, Homo sapiens
taagcaggggtgttgttaggcagtgcatatatgggtttgtagttgagagaygagctatgggcaagagataaagacttaagagtcatcagccttctagatta

SEQ ID NO: 784 - DNA, 89 bp, Homo sapiens
aagacctctaggtttgcaccatattagaattctaagcaggggtgttgttasgcagtgcatatatgggtctgtagttgagagatgagcta

SEQ ID NO: 785 - DNA, 101 bp, Homo sapiens
aaaataatttccttctaaaaatacatttaagcttctcaaaacacttgaatsaaatggtgataagtccaagatggccaaacaggaacagctccagtctacag

SEQ ID NO: 786 - DNA, 101 bp, Homo sapiens
tctatgactctgcttagattggtgtgcaggccaaatctggttacttctcaygctctgatttaagaaactttatatttatttctgatagtgatgcacaccat

SEQ ID NO: 787 - DNA, 101 bp, Homo sapiens
ttaatttatttatctatttaaacatgtattcaacatcactaagagatgctmtggcgttgatcttaaggacccagtctctggaggtgagcacacagggcctg

SEQ ID NO: 788 - DNA, 101 bp, Homo sapiens
tacgaaaagtggagacataaaatataaatgagaagacatcattcaatattmtaaaggctttaaaaaataattagagaatatcataccaatatagttgaata

SEQ ID NO: 789 - DNA, 101 bp, Homo sapiens
tcaataaaactaaaagcttgttccaatactccagccaaactaatgtgtacraaaagtggagacataaaatataaatgagaagacatcattcaatattataa

SEQ ID NO: 790 - DNA, 101 bp, Homo sapiens
tcgtgaaggaaagaaggtcagcagtttttcctaaattgtccctttttgcaytttcttgatttggaagttttatattgcatttttcttaacctagcagtaac

SEQ ID NO: 791 - DNA, 101 bp, Homo sapiens
gagggagccaaaggtggctacgaagttcttagcatcagaaatagaaaaaaytgaattgccattattaagagatggacagtagagagtagagcagtttctga

SEQ ID NO: 792 - DNA, 101 bp, Homo sapiens
tttaaaacagaaatctagaaactatttgaggaagaatttggtatatgataygagacacataaaatcactggggaaaagaatgaatgctttataaatggcac

SEQ ID NO: 793 - DNA, 101 bp, Homo sapiens
ttgccttcatatcactaatatgagttttctatgttatttgagaaaatgcarttctactacagaaaacaggaaaacaaaccaggatgaaataaaatattatg

SEQ ID NO: 794 - DNA, 101 bp, Homo sapiens
tggatataataatatatgagactgatgatacaatttgacttaatttttccyttttgcagtcctgttctaatcatttttctttgattgatttttcttttttt

SEQ ID NO: 795 - DNA, 101 bp, Homo sapiens
atggaggaaagttaaaggactgttagacttggttcagtagcacattctgcrtcccttctgagaatagaagtttcattctcaatcaagaacatgaagtttcc

SEQ ID NO: 796 - DNA, 101 bp, Homo sapiens
aaggaaagggataaataaattctacatggaggaaagttaaaggactgttasacttggttcagtagcacattctgcatcccttctgagaatagaagtttcat

SEQ ID NO: 797 - DNA, 101 bp, Homo sapiens
atttatcatttacttgtgaaattacactgtaaaggctcagtaaagaaagcragattatgcatattcatacgatgcttcagtggagatgataaatgaaacat

SEQ ID NO: 798 - DNA, 101 bp, Homo sapiens
gatacttattttttattattaaacaatgtcaaagcgaaattcttgaaaccyttagtgaatcaggataacctcttatcttcttgtaaggagtttgtgttttg

SEQ ID NO: 799 - DNA, 101 bp, Homo sapiens
gataaaaattcatctaaagtgacccagaactgacacagaatttagaatgastagatatgggcattaaaatggtatatttgtatttggtatatccaaaaggc

SEQ ID NO: 800 - DNA, 101 bp, Homo sapiens
atggttgtggcaaagtcctctagaagttactaggctgccctgcctttgtaytttgaaagattatagttgtctcattttacagcatgtcaaaacaaagtttg

SEQ ID NO: 801 - DNA, 101 bp, Homo sapiens
tgtatctttaaaagttttcactcatacacaaaagcacaaatcattgcagtyctttgcatacttttaaaataaatttcagaagctctttttccaaatggaac

SEQ ID NO: 802 - DNA, 101 bp, Homo sapiens
gagaccatgatccttgggttggaaaacacttaatcttcatgtcatatgtartgaaaataagctcaaagcaaacgttgatctccttggcaaaaattccccca

SEQ ID NO: 803 - DNA, 101 bp, Homo sapiens
ctctttggagctgtatgctgcaacttccagtgctatacagaatgtttttaragggagagcttgggaaatcacagggatcaacttgcatggttcccttctgt

SEQ ID NO: 804 - DNA, 101 bp, Homo sapiens
aacttttccatatttttagatttagcctacttctcttcctaccattaggcrttctaaaagtaaaataggaggaaacactactttttgctatttaactaaaa

SEQ ID NO: 805 - DNA, 101 bp, Homo sapiens
caatttttaaatcttagacttctctgatatttctcacgtagattagtaccwcaattcaaactggatgtctacgttcttttgcattaaacaatccttagaaa

SEQ ID NO: 806 - DNA, 101 bp, Homo sapiens
ttgctcagacttgcccttttgattctattggctttcagccaactattacamatgaagattaaatatgttgattttaccaggcagagccttctgtaatgata

SEQ ID NO: 807 - DNA, 101 bp, Homo sapiens
ttaaagaagcttgtgcaccttccaaattgtagggagcgaattgctattgtmcacatcaatcatagtagtgtcattcatcttgccatatgattggtatatcc

SEQ ID NO: 808 - DNA, 101 bp, Homo sapiens
actggggagggaagagaggcatgaggtgtcaagaggaactcagcctcagcytattttcagaacagaatggcggttgtaacactcagttaattcaaaaggct

SEQ ID NO: 809 - DNA, 101 bp, Homo sapiens
ggttagacactttcttcaaattgccgggtctaacacagtacatactatacwtgcgtgcttaacaatgtgtgttgcataggaatgaatgaacaaatgcttcc

SEQ ID NO: 810 - DNA, 101 bp, Homo sapiens
ccccaccaatgccccaggagtacttagtgagttaaattcgaccatttaatrtacaactcccataacaaagaatgtttcacccttgaaaggcgatattgcat

SEQ ID NO: 811 - DNA, 101 bp, Homo sapiens
ctcttcaacttccccttcccagactgagtcgtctggtatttttcgtcacartccctaatggcaagccagtgtggtacctaaaacattcaagacctggggag

SEQ ID NO: 812 - DNA, 101 bp, Homo sapiens
acattcaagacctggggagttagtgtaaacttccaatgaaacagagttgarctaaatagcttatttgttaataggtatatagttttaataggctttgaaaa

SEQ ID NO: 813 - DNA, 101 bp, Homo sapiens
atgaggaacaggggagaagcagaaagaagggactctcttccatttaagcayggattcagaccgtggcaagctgtcacgcctctgatggtggtagtgaagga

SEQ ID NO: 814 - DNA, 101 bp, Homo sapiens
tgctcagttgcatagaaataagaaagaatataagttgcttccctccagcartttccagtttttctagagaggcaagatacagtacaagcagagaacggtat

SEQ ID NO: 815 - DNA, 101 bp, Homo sapiens
tcaggatgcaaaagtgaccccgtgtcagtcagtgaacatgctggtttcccraagagtccaaaatggtagctgcgacctgcagtgtaaggtttgggcaacag

SEQ ID NO: 816 - DNA, 101 bp, Homo sapiens
tttctgtaccttgctgttccccccctgcccccgcacttatcttggagactytaaaaatatctgtaccttgaaagtttcctcatgcactctttttttgagct

SEQ ID NO: 817 - DNA, 101 bp, Homo sapiens
aagtggcaaaaacaggatttcagctcaagcaatctgattccaaaacagacytttttcactgtgctgccattcttttgcctggtttttctgttaacttctta

SEQ ID NO: 818 - DNA, 101 bp, Homo sapiens
aaaaatagaaccaccaccaaatataaatatttatttccatatctcacaatkttttcctaggccattgctggtgacagactttccagtccttttcagaactt

SEQ ID NO: 819 - DNA, 101 bp, Homo sapiens
aaaaaaagaatgtttaagtgtatagccaatgatccacaaggctagcaactsatccatgattaatagctcaaggtcataaaagtagtcaggtataaaagccc

SEQ ID NO: 820 - DNA, 101 bp, Homo sapiens
atatataatagaaggtcaaacctaaaatattattcttaatcatccatcttmtcaagagcacataaaattataagaatgtgcacttgcatttatgatgttct

SEQ ID NO: 821 - DNA, 101 bp, Homo sapiens
catggtagtcccacagaacatatcagagttacccttgtttacattcatacmtggggatctaaatagtagtcccatctagctgctgctcacatgttggctgg

SEQ ID NO: 822 - DNA, 101 bp, Homo sapiens
aactggaagcaaggacagctccgtaagaaaagggaagataaaaccagggarttagctggagttgaatgctactttccttcaagttttgcagagagggagtg

SEQ ID NO: 823 - DNA, 101 bp, Homo sapiens
ctcctgcccatggtgggaggttgggaaggacattcccccatttccatttgytctgccattcaaaaccttgtgagggccctcagggaagaatccctttgcag

SEQ ID NO: 824 - DNA, 101 bp, Homo sapiens
cccttatgaggcagacatttcccccagtaaacacaaagctgagtttgggaygctataaacaattctgtggactttcacagtaagatcagatcggagcatgg

SEQ ID NO: 825 - DNA, 101 bp, Homo sapiens
aacactcctagggagacttctcttgctccaaccccatcatctgcatttcastttaatgaatctctatattttcataaaactttgatttacttccatgtaaa

SEQ ID NO: 826 - DNA, 101 bp, Homo sapiens
ttaattgtttggttgttttactaagtctgtggcctctgaatgtgcttataycattactggatttagctttattttcttactttaagtaatccgggacacaa

SEQ ID NO: 827 - DNA, 101 bp, Homo sapiens
gttctaagcaaattacgacttaacaaattaatgaaagagccaggatgttarcccatataatctgtcggcaatatgagtgctcttcctagaacacacctctt

SEQ ID NO: 828 - DNA, 101 bp, Homo sapiens
tctatttattgtctggttttataactgtgtttggtattgtaaaagtaacayctattttagaacattgaaaaaaataaaaattagatcaaggttttaaaaaa

SEQ ID NO: 829 - DNA, 101 bp, Homo sapiens
caataattattttaaaggcaaactggttaatctctcctattaaaatacaayggttgattgaatggataaaacccaggattcaactacatgctctttacaag

SEQ ID NO: 830 - DNA, 101 bp, Homo sapiens
ttcaattttctccctatctttccatctctttttaaaaatgtccatctttckgaaataactgttagatagaagttggaatttctgtttttagcttccttgta

SEQ ID NO: 831 - DNA, 101 bp, Homo sapiens
aatcttaagacattcatcccatctgtaaaaaataaataagtaagataagcrcaggtcttcatccttctgttctgtacaacagctgaaactcaagattattt

SEQ ID NO: 832 - DNA, 101 bp, Homo sapiens
agcatattcatgaaatgcaatgctcacccttggttccaatggaaccaacaygtaaagcaagatcaactcagtaataggatccttgcccattaatggacatt

SEQ ID NO: 833 - DNA, 101 bp, Homo sapiens
acttactctgtttactttttttcttttttgacctctattgtggtcacatakgttacttctctaagtttctctgacctcctattgtggctatacattttagt

SEQ ID NO: 834 - DNA, 101 bp, Homo sapiens
tatgtaataaaatccattaattcaacaattatttatggagcgtcttctatwtgacaggggactatgacaatgaacaacaacacttagagtggggaagataa

SEQ ID NO: 835 - DNA, 101 bp, Homo sapiens
tttgcattcaagtgaaaatagatgatcccataatttgcaagttgtcttgaragcacaagtgccagaaaggcagaggaggaacaatggaaaggatttcatgt

SEQ ID NO: 836 - DNA, 101 bp, Homo sapiens
gatcataaaatcaaaatgaatgaaaactaggctgaaagcagacttctaacrgcaacaataaaagacagaagacattgataagattatatcttcagtatgtt

SEQ ID NO: 837 - DNA, 101 bp, Homo sapiens
gggatataaggaattattttcagaaccagaggaaaagaataaagttcagastagatgaagcaagacatggaaaattggaaaaaaaataggtttagacttaa

SEQ ID NO: 838 - DNA, 101 bp, Homo sapiens
aaaagagttataaaatcagtcaacagaaatctcaattagaaaaaaagtacytgtagcatagaagtattttttttttaatgaggcaaaaatatacttagtgg

SEQ ID NO: 839 - DNA, 101 bp, Homo sapiens
tcctaatgccaaagaaatttgaataaaactgctttttttctttttcttttstcctaggaataattatacctatttactcttgcctattctattttccccta

SEQ ID NO: 840 - DNA, 101 bp, Homo sapiens
gtgtgtttgatgtagaaattgtgacagaattttaaggacatgaaggttaayactggattttatatttctcttcgaccttcctaatttatcaatgtaaatat

SEQ ID NO: 841 - DNA, 101 bp, Homo sapiens
tgttactttattttgcaatctacttccagtagattagttactcccatggcrtatttctgtagcagtttgtatgtctgtgtcatcattatatacctctaaaa

SEQ ID NO: 842 - DNA, 101 bp, Homo sapiens
cattcttctcacactttcagttgaaatgtgctatcactttggggcaaagakgtaggaatatctctacctaattgtttatgaagaagtcctggaaaagaagt

SEQ ID NO: 843 - DNA, 101 bp, Homo sapiens
tttttcttaggaattgattttccacaagttgatttttctgtctcctttaastgagtaggataatgttaattgcctggctaggccaaataaaaacagctgat

SEQ ID NO: 844 - DNA, 101 bp, Homo sapiens
tgcaagctgttggccatggctcgattctctaccatcatcgcttctcctcawtcggctttttcattgaggagcagtattgtcctactctcagggcctgcctc

SEQ ID NO: 845 - DNA, 101 bp, Homo sapiens
ctttccttataactttttctatttcatagttatttaaatggagagactacrgtaatattaaccttttccatcccttttgttcagggtttatgcttcctttt

SEQ ID NO: 846 - DNA, 101 bp, Homo sapiens
ccaagtatgcatttttccctcatatgttttaagttctgtctctagtatcayggaactggaaagatattctgctaggaatagctcatggagaagcaggtctt

SEQ ID NO: 847 - DNA, 101 bp, Homo sapiens
ttcaacaggttttcttcagttgactatgggcatttctaaggggtactgcaygaattaatgatggttgcacagagaaaattaagtgttaccttgctatttat

SEQ ID NO: 848 - DNA, 101 bp, Homo sapiens
ctgcagtttctggtctggtaaatgtgtcatggagtttatttttcaaaaagygacacataaaacacttaattcaatttaacaacaaagtttgccttctaggc

SEQ ID NO: 849 - DNA, 101 bp, Homo sapiens
ttcccccacccccaatggtcagaatcacagcttgtgcctttccaaagtcartgtttccgtgaaataagtcataaacaataggacaacttaaatgccaaact

SEQ ID NO: 850 - DNA, 101 bp, Homo sapiens
aaggcggatatgacaatcctctgcacaagcttcttccatttgcttgggtgwcatttcttggactaaacatgcacttctccactgagtgaggaataagaaat

SEQ ID NO: 851 - DNA, 101 bp, Homo sapiens
caacatgtcaatctcctttctcatttaaaactttccccatcctgtcatcasctaaaatgtgggaggaggacttgggggtcagggagagcgggaagggatat

SEQ ID NO: 852 - DNA, 101 bp, Homo sapiens
cagaagataccatcgtcactcttaccaatgcaactgtggtgaacaggaccrctattattccttagatcaaaaggacagcacattcaacagcatcctcatgg

SEQ ID NO: 853 - DNA, 101 bp, Homo sapiens
atgggatattctccttattacgaatccaggacaggcacataattttaagaktaattggtacagaaaaatagactaagaataaagaatatatataggataat

SEQ ID NO: 854 - DNA, 101 bp, Homo sapiens
aaaataagttcagcctgtgattagtaaaataaagaaaatagatttctgtckttgagaataatggtaggggagagtgatttatattacatcatctgtgaagg

SEQ ID NO: 855 - DNA, 101 bp, Homo sapiens
agtatgcgagtttaaaagcatgtaggtatgcattttgatttgatagtatgrctaatgaaagaaaaacaaacattacatgcacaaatttagaaatcatgtag

SEQ ID NO: 856 - DNA, 101 bp, Homo sapiens
aaagttactcccaaaccaagaatgactgtgttattgtatcttgccctgackttgtattatgacaaaccaaaaacatagaaaaatggcaccaggagctgcta

SEQ ID NO: 857 - DNA, 101 bp, Homo sapiens
gagtcactacttgatgtaacattttactgctctctgaaaaggtttatcttmggtgacacaatctgggggatgatttcatcacttaaaccatatctattttt

SEQ ID NO: 858 - DNA, 101 bp, Homo sapiens
catcatgagtcaaaggcaacaagtccattctctagcacaccagaaacttcrtcaaatgatagtcagaagcaaagcagacatgattcctggattcacttaat

SEQ ID NO: 859 - DNA, 101 bp, Homo sapiens
aaaatgtatgggagtaaagaaatatataagtaaatgtgttaagaatctcarctttatctgtgcacattcatatgtcaggcaagcctttctcaaattgatcc

SEQ ID NO: 860 - DNA, 101 bp, Homo sapiens
atatgcagtgtgtctggacagatttttccgccatgctaattctcattttcktcgtctctaaaatgaagttgttgggaggaatcagtgagataatgaatata

SEQ ID NO: 861 - DNA, 101 bp, Homo sapiens
aagtgagtaggatgggggcaagtaagagttcactggtcatctttaagaacrttggttagggagatatgtaatgccatcaaattttgtcattttctccccat

SEQ ID NO: 862 - DNA, 101 bp, Homo sapiens
tgttggaaccatacatgcattgcagcatattctacacagatcatgaatcasttaggttaggaaattgtgcatcataacatccatatgtacattaccatatg

SEQ ID NO: 863 - DNA, 101 bp, Homo sapiens
ctgcacctggccaacattcaatagtcttgattttattgtttacttataaarttatggccaattaatttatatctaaattattattatataagattataatg

SEQ ID NO: 864 - DNA, 101 bp, Homo sapiens
agactattagaaatgggaaggacagtaaaagcatctctctctctgtcagartcaaaaaaatgccttagttcagatatttgaaagaactcaccacactgcac

SEQ ID NO: 865 - DNA, 101 bp, Homo sapiens
cctctggccagcatgcaggcacaagcttggagaatcgggcaggaagacgcrgctaagcattaactttcaaattcagctctgcccaaattaaagagagggac

SEQ ID NO: 866 - DNA, 101 bp, Homo sapiens
aaatttgaaatgattcaataatccctaccatgttctccctttctcagtccrtaagcccttcctctatgtataaatggttctcggccagctttttccaatct

SEQ ID NO: 867 - DNA, 101 bp, Homo sapiens
taagccaagcctgattttaccatatgctgaccaatgggagctagagtcaaycttagtgatgcttacccaccacagtcaatggtaatattcaaaatatttaa

SEQ ID NO: 868 - DNA, 101 bp, Homo sapiens
attgacacaacaatatcagtagtatagtttgatgggcatcagatatccatrgacttaaataacagacaaaatacatctccttcatctatcttattaactgt

SEQ ID NO: 869 - DNA, 101 bp, Homo sapiens
aggtatggttgtctctgttatgtggtggtgatttgtactcatttagcataycaagattttctcatttttcagtgatgaactgatgctactgatataatatg

SEQ ID NO: 870 - DNA, 101 bp, Homo sapiens
cgtgaagcaaaaaccagaaggaacatgaaaataggtaggactttaggcagyggtcttttcattcatattatatcagtagcatcagttcatcactgaaaaat

SEQ ID NO: 871 - DNA, 101 bp, Homo sapiens
tagagcagtgactttgtcattgtgccattatcttttatttttaatagaaayctatggctgcagagtaaattcccttaatcttttttgaataaaccaatatt

SEQ ID NO: 872 - DNA, 101 bp, Homo sapiens
aaggatcaaacagacttaaaagaataaaatcatgcctttaggtaaatatgyatgtaacactaatggaacagtgcagtgtatatcctgcccgatagtattgt

SEQ ID NO: 873 - DNA, 101 bp, Homo sapiens
gttaactttttgagaatagacagaggcaataaaaaaatttgcctaaaaacmaaccttatgacatttttatccatgtcataagtcttactggaatgcaatct

SEQ ID NO: 874 - DNA, 101 bp, Homo sapiens
acttttaaaaactatatataattttttaaactcgatcttccttaaagattycagaacacctccactgaatgaatgggttggaatgatgtgtccttctgatg

SEQ ID NO: 875 - DNA, 101 bp, Homo sapiens
caaagaaaccatgaagttttaaaacaatttcttcttatatcaaattggcaycacatgtttatagcaacgctatttacagcagcccaaacatggaaacaacc

SEQ ID NO: 876 - DNA, 101 bp, Homo sapiens
ccattcagcttgactctgttagcattaccaactatgatgtgacattaaggrtcattccaaagtgatacatccatcatctgacagctttagatatataaagt

SEQ ID NO: 877 - DNA, 101 bp, Homo sapiens
ctcaccatttccttggctggcctgctcctcgcttcactggcctaattattytcataagcagcttaactgaaatgttggcttacaaatttatatttcaattt

SEQ ID NO: 878 - DNA, 101 bp, Homo sapiens
tgttaaattctgtttctttaacattttttaaaacttcctttgttaatttayggaatactatttgattacttaataactgtcaggatctagagctaaaataa

SEQ ID NO: 879 - DNA, 101 bp, Homo sapiens
tccagatgaaagtataatgaacttcggtctgaacaaatcttatgaggctcmttcttaggcctaaatcatcaagtgtgttatttctcttagtgtctgagaaa

SEQ ID NO: 880 - DNA, 101 bp, Homo sapiens
tcataagataatcttacctctctcttctacctgaatttaaaagacttttgracaagaatctatcattgcagtttgatggtgctagacaggtttaaggaata

SEQ ID NO: 881 - DNA, 101 bp, Homo sapiens
attgctgaagctatgggacttgttccaaactgcaagatcttatttgatggraatgattgtagctttaggtaattctgcggcttattggcttgggtgagagc

SEQ ID NO: 882 - DNA, 101 bp, Homo sapiens
actgctttcttcaatctaggctttgcaagaatatgagggtataaccgaacrtagtgctgtgtacttactaggtgctcagtaaacattttacagtgaaaggt

SEQ ID NO: 883 - DNA, 101 bp, Homo sapiens
ggaataactaagagataatacccttcctcagtttccacaaatgactaagarcagactggtctaaagagacagagaaggaggccgaggcgggtggagcacaa

SEQ ID NO: 884 - DNA, 101 bp, Homo sapiens
tgcttttatctattttatgataatgttggggttttgctaaagactcccttygaaacacagggtctgctactgaaaatgctatgaaaatcattgatctagaa

SEQ ID NO: 885 - DNA, 101 bp, Homo sapiens
tgtttcacatctgctctttaacccatctgttgattacgattaccgttgttwagatcgttgttatctcaatgatgacaactttccaattccagcatttttat

SEQ ID NO: 886 - DNA, 101 bp, Homo sapiens
tagggaggccatgatggcaaaatgaccttaggagactttttcattgtaccrtttctcatgctatccctaagtcctaaaggttcttggcaatggtttggggc

SEQ ID NO: 887 - DNA, 101 bp, Homo sapiens
gtgttgatatttctgaagatatttctttcagaggtgcatttgtattaagtsactctctggatatattgaataggggtaaggaggaggcaagtcaattggca

SEQ ID NO: 888 - DNA, 101 bp, Homo sapiens
agactatatgggaatagacttgaatctggaaataaactggcttaataccaygtgcctaggatttgtggtacaaagaaacaagcgtttcatgttgtcttacc

SEQ ID NO: 889 - DNA, 101 bp, Homo sapiens
acaattgggaaaggaaggaaacaccttgagttgatggagaaaacactaaartcaatgagataatcccaaattgattatggagaagctgagacaaatctgaa

SEQ ID NO: 890 - DNA, 101 bp, Homo sapiens
agtgtcaaagaagaaattgctgttgaacataaaagatcagaggatttaatstttcctgacaacctatagaagcagaataattgaacctgcctcctgcttag

SEQ ID NO: 891 - DNA, 101 bp, Homo sapiens
ttaaatgcctgtgggttccctgctgaagggaatatcgaacaagcgtaagtygtagacactcatctcaaggtacatgcagactgactcatagctaaatgagt

SEQ ID NO: 892 - DNA, 70 bp, Homo sapiens
gcagacaaaaactattagayatggagattaagaaaaaaaagaataaaagtcatttttcctattttaacat

SEQ ID NO: 893 - DNA, 101 bp, Homo sapiens
tgttcatctttgcttttgcttttgagttaaggcacaggatataaaactatkttcattatgtgtaccaacctataacagaaggtttcagttctctaccattg

SEQ ID NO: 894 - DNA, 101 bp, Homo sapiens
cccctgaatgtcccaacattatttttgcacttaatgttggtttatgggatygtagaaataaaagaaaattcatacatctcactgtttttcatgtttatttg

SEQ ID NO: 895 - DNA, 101 bp, Homo sapiens
catattaaaatttgattgatgtttgtctttaacaattagatagttagattsaagcaaaacttttcaagttatataagctttaagttatagcaccaatagtc

SEQ ID NO: 896 - DNA, 101 bp, Homo sapiens
taaataaaaatttcaggagtaacaaggtgatatattaattaattgacaacraatggtacaagcaatacatagcatgatgctgaactataatccacactcct

SEQ ID NO: 897 - DNA, 101 bp, Homo sapiens
aaaaaatcaagaaacagatttgaactagatggtgaaggtacaagggaacayataaactgaggataaataggatgaataagggcaagaagaaatttcagaaa

SEQ ID NO: 898 - DNA, 101 bp, Homo sapiens
ctgacagcatgtaatgtattctaaaactttttcattatagttcttttggcktaacctaattttttattttttaaatggactggaataaataaaagccaaaa

SEQ ID NO: 899 - DNA, 101 bp, Homo sapiens
ttgggaactggggtctaataacgcctaatgcgcttgtaagatgaaataagrtaataggtgacgtgcttagagtaataggaaatggtgccattgtgttattt

SEQ ID NO: 900 - DNA, 101 bp, Homo sapiens
gttaacgtgattaattaggcaggcagaatctttttcctcctggctaagaayataggtggactattagaacctgttctaatgttttttgtccggccttcacc

SEQ ID NO: 901 - DNA, 101 bp, Homo sapiens
ctatgcttctgctcattctcagtacacagcaccagggcactcaaaaagttkgttgatccaaaagaatcgagagtagggactcacacacacactcatccttg

SEQ ID NO: 902 - DNA, 101 bp, Homo sapiens
ggcttctaatttctatctaaacttgtctcttcatcaataattttatgctcytattccacagacttttaaatgaatgtcacattagtctaaatcagccctct

SEQ ID NO: 903 - DNA, 101 bp, Homo sapiens
tttttccaaaggtgtaattttgaattttgtcttattttgttttttcttacrtgttatcagggacagtgaggcaaggatatatttactcagtcttttcaaaa

SEQ ID NO: 904 - DNA, 101 bp, Homo sapiens
ttatgtttatatattgctgtcatattatttatcgcatttacttatcacacyagactctgagtcagataagacatggatcagaataattttatagttactat

SEQ ID NO: 905 - DNA, 101 bp, Homo sapiens
caccttttcctctagaatatattataacctgaataaatcctgggccttatstcaccaagtttcagggcagtgtaacattcaaagaaacaaccaaaagcaaa

SEQ ID NO: 906 - DNA, 101 bp, Homo sapiens
ttaagataagcaggattaaatgaatagaaatgcatgtgattgagcattaayggcccagtgtttcaggcctgtctctgctactgattagttgtttgacctgt

SEQ ID NO: 907 - DNA, 101 bp, Homo sapiens
aagagcatactagacataacagaaaataggttgagcaaactcaaaaactartcaacaggaaatatccaaactaaattacaccgacaataaaagaatggaaa

SEQ ID NO: 908 - DNA, 101 bp, Homo sapiens
ttaaaatattcaaaaatgtaatgtgcagaagcttacttctgggtaggccaytattttcactgcaacaacgagaaagaagtggataaattttaaaatcattt

SEQ ID NO: 909 - DNA, 101 bp, Homo sapiens
caaaagagtgggcattccagaactctgtacttgtctcctaactcaacataygtagaaacaaactaaacctgcacttctttctagtcaatgaatggcagaga

SEQ ID NO: 910 - DNA, 101 bp, Homo sapiens
ttacaaagtggagtagcaaatgttatcaagtatcaaaaatgatatttcacktcaaagtctttttaattctgagtctattagaatactcaagataaacttca

SEQ ID NO: 911 - DNA, 101 bp, Homo sapiens
cagcacaaaaacgccgtggttccggaatcacccaccacctcagtgccaccrtaatcatccatcaacactcagtcttcaacatttacgaagaatttctattc

SEQ ID NO: 912 - DNA, 101 bp, Homo sapiens
aaaaatgagtttctagatggaaacagctcattgaagtatccagcacagtgmattaacgtaaacctaagacacatcttcgtaaaatttcagaatactaaata

SEQ ID NO: 913 - DNA, 101 bp, Homo sapiens
acaattggttcattggaaagttcacatggaaatactgggctcccattgaaygcactaatctttaaatttaatttctattttcaaggctgttggtatttgct

SEQ ID NO: 914 - DNA, 101 bp, Homo sapiens
ggagagcttcagggcatttctaaaccccaggggatctctagaaccctatgraagactaaggaggaatgagacttctttagagcctgactgggtgctcaaga

SEQ ID NO: 915 - DNA, 101 bp, Homo sapiens
gggcctcctgcaaatgaagagtcaaaacagaaaggaatgtgttctatcatrgatcagatcaaagtctttgtttctcctcctggcaagaaagcagacactct

SEQ ID NO: 916 - DNA, 101 bp, Homo sapiens
gaaggggctttctcacccctcctttatccttatttggatttgtttgttcayatacttattaaactgtattgaccacctactgtgggtctaggcactctgct

SEQ ID NO: 917 - DNA, 101 bp, Homo sapiens
cacataactaataataaactgccttcagctaatcctccctcttccataaartattccttcccttttgatctcagcatctagcctatgccactgcaatttag

SEQ ID NO: 918 - DNA, 101 bp, Homo sapiens
ttcatttccttgtggtaatttttttagatgctcttcatcactaagaaatcygaactctgtgtattctaggaacactagagtgccttgtatattcaagtatc

SEQ ID NO: 919 - DNA, 101 bp, Homo sapiens
gcctcgtatggttcctgggcaatcctccctttgcaataactcacaaactayacagttttcctccaaatgtgtgtaaaccttatgatgcgtctgaggcaaca

SEQ ID NO: 920 - DNA, 101 bp, Homo sapiens
tggcacctatgagctgacctaataacagttacaccattacagctccgattmtacagaacaatacatatccagttcttatctatgctttgcatgtgctcttt

SEQ ID NO: 921 - DNA, 101 bp, Homo sapiens
actgccatttactgcaattgctctcagttacctttaaaactaaagcccackgatcactgttaacacccaaaatcatatgccctatgacagcacaaacaaac

SEQ ID NO: 922 - DNA, 101 bp, Homo sapiens
gtgctattttcatcatgttcttcattgcacagacattttcttgaggttggygggtgacctagtatcatctaacccatctatgaccaacttatcctaacata

SEQ ID NO: 923 - DNA, 101 bp, Homo sapiens
tggggggcattagatgaggctggaggatcattagagggaccaaaaccagtkcatagctcctcagagatgagtgggtgtgaggatgggggattgacttgatt

SEQ ID NO: 924 - DNA, 101 bp, Homo sapiens
ccacactgcaatgtttgaatcaaggccattttcttcccaggtagcctcctrtgaatgacggtatggcagggtaatagggtctcatttacatccaatgagag

SEQ ID NO: 925 - DNA, 101 bp, Homo sapiens
ttttggttactcccatcaactggtatccttcctgacacgaaaatgtgactkcggcacctactgtataaatctcacctgaggagtggccattttccggattt

SEQ ID NO: 926 - DNA, 101 bp, Homo sapiens
gaaaaaagcttctaataacccacagttaggataatcagggagtaggaaatragagagatagctgttaatctttgtttgaaaccaagaacaacaatgctagc

SEQ ID NO: 927 - DNA, 101 bp, Homo sapiens
taggatcacaggatcacatgtgccacctgcccatgcttttttctcaagaaytgccatttggacccttattaggtgacaaatatcgctcatctcatagactt

SEQ ID NO: 928 - DNA, 101 bp, Homo sapiens
atacttactaaatatttattaaatgaatacataagcatttaacagcacatyctattcccttatagcacctttaacctgctacaatttagtgtctgatagac

SEQ ID NO: 929 - DNA, 101 bp, Homo sapiens
tattcacaaacatttcaaattcatggcaccattttccattaattcctatcrtaaggcaattttcctctttaacacttagaaatgtacacacattcacacac

SEQ ID NO: 930 - DNA, 101 bp, Homo sapiens
ccaaagctgcataaatcagtgctaggtgatgaagtgtcttttctgtaagcrgatacctacaaagaattatattactatatttctattcatttgatatcaga

SEQ ID NO: 931 - DNA, 101 bp, Homo sapiens
gtaatgataatgccatcagcctcataatgatattgtctgatgccttctcayaattcaattcttctagatcctatcagaaaataaagaaaatgtaaaaattc

SEQ ID NO: 932 - DNA, 101 bp, Homo sapiens
ataaatgagcatttgtagatttttcatcaataagtgcaataggtgaagaaygacttttatgttctagacatgctgaaaacagaaaataacaacacacaagt

SEQ ID NO: 933 - DNA, 101 bp, Homo sapiens
taataatgactccaaagcacaagagtaatgaggatggtatttgttatggtygttctattttactattttactatagttattgctgttaatgtcttactatg

SEQ ID NO: 934 - DNA, 101 bp, Homo sapiens
taaaaatgaataagacattgtcttaaccttcaaagaacacaagaaaacaargaatagagttttataaagaaataattacaatacaatgtgcaaagtacaat

SEQ ID NO: 935 - DNA, 101 bp, Homo sapiens
gagggaggcagacattagccatggagtgagactaatgactccaaaattacrccctatgctgtgatgggcaaagcagctctgccaacccagtgtgctgagtc

SEQ ID NO: 936 - DNA, 101 bp, Homo sapiens
agctagtcatcaggggaaggagagactaattagcactgcatcctgagaacrgttttattcatggctttcctcacaagaaatgttgagcaataccatggagg

SEQ ID NO: 937 - DNA, 101 bp, Homo sapiens
ggatgaatacatgagtaaatagatagatgtctctcagaatggtttagtagytcctcaaggacaataactagatatgaattatttattagcctatacccgag

SEQ ID NO: 938 - DNA, 101 bp, Homo sapiens
ggctgcttccccgagtgcagggccctgaaaagcaatgatgagaaaaggaargtgtgctcacttagtggccctctgacagcccaagtcagcagcctctaggt

SEQ ID NO: 939 - DNA, 101 bp, Homo sapiens
ctggatctggaatgaggctgtgagcttgcataactctttcccttcattgcytcttttgccgtaggaaccagctgccctccaaaagcagccttctgctctgc

SEQ ID NO: 940 - DNA, 101 bp, Homo sapiens
caagaggagatgactgtttactctcactttctggactaggttcagagtacytccttgctgcatcaccttttgtgatattaatattcagatgatgcaacctt

SEQ ID NO: 941 - DNA, 101 bp, Homo sapiens
cctacaaaatgaggggagactgacttaacacgcaatattaccattttcaawctgtgttttcagaacagaattgtttcttccaacacggttttatatagaag

SEQ ID NO: 942 - DNA, 101 bp, Homo sapiens
atttgcacgagttacctctgcaatgccctatcttattatcatatgagttcygtacaatatttcactccatggtatggagtatgtgctcttttcacaaacaa

SEQ ID NO: 943 - DNA, 101 bp, Homo sapiens
gcttgggtcgatcaacattttccaagtattgaaccagagatgaatttagayggcacatgagtgttttaacttcgatagagacatacttacttttgcaggct

SEQ ID NO: 944 - DNA, 101 bp, Homo sapiens
ggagaccacttgcaaaatttaaaaaaaaattgattctttgaatgatgactyaaagtgcgattctgataaaattttctctaatcattcaacattattgaaat

SEQ ID NO: 945 - DNA, 101 bp, Homo sapiens
aaaaaatcaagtcattaacaggttatataattcaccccaaatcatgcaatyagtaaaaggcaatatagagactgaaacctatatcatctaacttctgagcc

SEQ ID NO: 946 - DNA, 101 bp, Homo sapiens
catgaatgtaattgtggggttaaatgagggactaaaatatggtcaagaagraattgtaatcagatattatttctgggtaatatcagattggaattttttta

SEQ ID NO: 947 - DNA, 101 bp, Homo sapiens
tggcagctgggcttcccaagagtaagaaaagaccaatttgactttccatgsattatgtcttcacctttgttaggcaagacataatctttttctttgcctga

SEQ ID NO: 948 - DNA, 101 bp, Homo sapiens
tataacagagggtcctctggccagggaatcatatgcgcatgagcactaagmaagtgaggacccacttatggttttgtcaataaaagctggactggagactt

SEQ ID NO: 949 - DNA, 101 bp, Homo sapiens
caatccctccttccctatgagattactaaactgacagaagtgctcaacatycagctgggaatgcagaaaacaaaccggacttggtgttagaaaaaccagct

SEQ ID NO: 950 - DNA, 85 bp, Homo sapiens
gggtcaattatttttccctagaatgtttgggctcratgtaagaaaaacaatgaaactactgttggaatatagcatctatgtagtg

SEQ ID NO: 951 - DNA, 101 bp, Homo sapiens
aatgtaagtttctgttaaataagaacctgatttaaaacaggaatattatgyatgctaagtcctagatagttctactgtaatatcctccaagcacttccaat

SEQ ID NO: 952 - DNA, 101 bp, Homo sapiens
agaaaacggcatggtaggactggttcaggctgtgactgtagatacgagacytttctaagcataaaatgactaaaactttgtgtaaaagaaaaaaagaatat

SEQ ID NO: 953 - DNA, 101 bp, Homo sapiens
gaattttcctttgaatatcaaactgcaccacataacactggtaacaacatmcatctggaattaactgaaattctggtctaggggtgttgcgtcctcagtaa

SEQ ID NO: 954 - DNA, 101 bp, Homo sapiens
gtaagtttcatgtgagacccaagtctggaaaagtctcttggtgtggttacygaagggttaaagacaaggtttctaagggacaaagatgaacaggacaatgg

SEQ ID NO: 955 - DNA, 101 bp, Homo sapiens
cttgaagtgtaatcctaatccatgagcttactatatttacggttactatayactggtatctttctcaaacaactttctgatttaatgctccctatcaggat

SEQ ID NO: 956 - DNA, 101 bp, Homo sapiens
atgtatcacctttcagcattttttttctaggcagatgtctctttctctacktagttgtcaataaactgtgtacttatgcacaatttcatgtgaccatttgt

SEQ ID NO: 957 - DNA, 101 bp, Homo sapiens
aagaatcatgtctcacaatgctcttgtagtcccaacatcccagtaaagaamcatgcatacagaaggcgattggagacatttatttgatttattgaacaact

SEQ ID NO: 958 - DNA, 101 bp, Homo sapiens
ttggactcatctccaggaagtgagttagctcaaagatctactggaaaaccmgaacttttagagctagaacatgccacagagattaccaagtttaacacaaa

SEQ ID NO: 959 - DNA, 101 bp, Homo sapiens
tgtaagattcccatttcttggtcttctgttaattactgtaactgttaagayttatttctcacttagactttaaacagagtttttgaataattttaagcata

SEQ ID NO: 960 - DNA, 101 bp, Homo sapiens
agagcctagacaaataatgaagacaaataattaatatcagctcaacagtarttaatataagatcacagaagtcctggacacatgaaatatcatcattcttt

SEQ ID NO: 961 - DNA, 101 bp, Homo sapiens
atcaaatccaaataagctcataatatctaaaaacacccttcaacctaaatrgccttctggaatcagcttggcctctgctgaatttcctttgttccacagta

SEQ ID NO: 962 - DNA, 101 bp, Homo sapiens
attcatactgtgagcaagttcgttttcactttgctgtaagaataaatcacragaaaatgtgcaacttggaggttctgaagctgtcatgtaagagttttata

SEQ ID NO: 963 - DNA, 101 bp, Homo sapiens
gcgggtacagttttcctggacactgagttaattttattatccattcagggrcttatataccagtttgttatacagttcatttagacaaaagttgaacagtt

SEQ ID NO: 964 - DNA, 101 bp, Homo sapiens
tcccatctcttcattcccctagtataaaattaaatttccctgtccatcgtrtatgcctaggggtgtgtttcacttgcatagagaatgtagaagcattttat

SEQ ID NO: 965 - DNA, 101 bp, Homo sapiens
tatttttcatgtttcttcatttcttagtgttatttaatcatttcaattagytctcccatttgttcacataactcagtgagtatacggtgtatattagaaat

SEQ ID NO: 966 - DNA, 101 bp, Homo sapiens
cttcctttgggtgccaagattccattacccacgattatctttatagaacgmttttcttaagatatttaaagtgagttctgtttatctttcttattttgaag

SEQ ID NO: 967 - DNA, 101 bp, Homo sapiens
caatgcattctggtaaaataatttccatatttgggatacagcaaatcagcrttctatgtatagcacctagggacatttttgttgttgaaaggatgatgttt

SEQ ID NO: 968 - DNA, 101 bp, Homo sapiens
cagggtttaaatgcagacgatctaaatcaccataaatattttaagcagaaygtaattttatggagagaattttacatagataaaatgttgaaatggttaga

SEQ ID NO: 969 - DNA, 101 bp, Homo sapiens
cttatcaacaacaacacactatacaaatttgtgattaataatgcttcataytgactttctttccccctttgctacaatgtcagccacatgatggcagagat

SEQ ID NO: 970 - DNA, 101 bp, Homo sapiens
tttttaatgtctaagacacaaatgcatacagacaatagaaaacattaaagsctattcatactgttagtacaaaatattacccagaaatgaaattttaggaa

SEQ ID NO: 971 - DNA, 101 bp, Homo sapiens
agtatttggcctgccctccttccattcctgccattagctatacttccactrtctgctatgctatctttagagacccatttcatttaagaaaaagggaaagc

SEQ ID NO: 972 - DNA, 101 bp, Homo sapiens
gggcaagaaggtgaggaaagacatttggggcctcattgctgaatacatcaytttttgcagactaagatgggttgctaaaaataaaaacatgtaaatttatc

SEQ ID NO: 973 - DNA, 101 bp, Homo sapiens
ttaattgtctagctttgaaatatgcatttatatttttaaatggcattgtamtaaaaattatgaagattcacagtaaatccagattgaatcactgtcactga

SEQ ID NO: 974 - DNA, 101 bp, Homo sapiens
taagataaatatataataaattgtttttattatggggtaaatttatgattstaaggtaaggatattaattgactaaatgaaaccattaatcattttgttcc

SEQ ID NO: 975 - DNA, 101 bp, Homo sapiens
ttcttaaaaaacaccacagagagttctgatgcatagcctagttgaaaagcmtttctagagtgattttgtaaccactgtgctgccatttaacgaatttcctc

SEQ ID NO: 976 - DNA, 101 bp, Homo sapiens
ctctctcctccctatagaagccctccctgcggccctggatctatgctcccrcctttcacctgtgcagaaggccccttccaaacacattctgccttgtcagt

SEQ ID NO: 977 - DNA, 101 bp, Homo sapiens
tggggtcactggaactggaactcttatgctttcacttttgtgggctgactyacagacatgtggacccagacaaaccaaatctggaaaccaccacatcccca

SEQ ID NO: 978 - DNA, 101 bp, Homo sapiens
tttttcacagaattagaaaagacaattctaatattcatgtggaaatacaawagagcctaaataggtagagcgatctaagcaaaaggaacaaagccagaggc

SEQ ID NO: 979 - DNA, 101 bp, Homo sapiens
cataaaagataacattcgcagcttccaaaggttaggacccagtatcttcarggtagcatttttgaacctgccactcaagggaagaaaatgcttcaaggatt

SEQ ID NO: 980 - DNA, 101 bp, Homo sapiens
accccagaacttaaagtataatttaaaaaaaaaatacatttcttggacccrtggtagaaagactgatcactatatccagatatccactccctcactgctct

SEQ ID NO: 981 - DNA, 101 bp, Homo sapiens
gtaatacagtgcatttgtgttgtggatttatgctttcttcgttttttggtmctttggcttataatagtattcatcaaagctaacaggcaaagtatgttaaa

SEQ ID NO: 982 - DNA, 101 bp, Homo sapiens
gaggctcacttaagagaggaatgacccatgtgagactaaagattttccatrttattaccattcagatatttgagaatttactgtattgctttaaagagaaa

SEQ ID NO: 983 - DNA, 101 bp, Homo sapiens
taacaatgcatttaaaagtcaatttttatcagattaagacatttgggtaamataatagaccctgaactagaggcatatataaaaattgtatatgttggagc

SEQ ID NO: 984 - DNA, 101 bp, Homo sapiens
aaaatgtagaattcattttgtagtaaagtagtttattttttttaatttcargtgatgtaatttaaaacctaagttgtgtttcaaaacagcaacaaaactgt

SEQ ID NO: 985 - DNA, 101 bp, Homo sapiens
cattatcaaaatggaagtcaattcatgtgagttaatgtaaagctctcaaaygctttcctatttcccttagaataaaaataacctctcaccatgggcgatag

SEQ ID NO: 986 - DNA, 101 bp, Homo sapiens
taactttcctcatcactccttcatcatatcctgacccctctattctttgaygtacctaagcagtagatcttccctcaagctttcatcttcccccaaacccc

SEQ ID NO: 987 - DNA, 101 bp, Homo sapiens
atctcctttatcactatagcattaaatttactctaatgatacttattgagwtcctatgtgctagattctaagggtttaaaaatgaatgagatacagttgtt

SEQ ID NO: 988 - DNA, 101 bp, Homo sapiens
tgtttaaaaaaaaaaataaaactgctataggaggtacaggtgttagataaratgctttatgaaatgttagttgtatagataataaactaggccatcttttt

SEQ ID NO: 989 - DNA, 101 bp, Homo sapiens
tagtcccatatttttctcactctttccaaagtgttttgttatatatctacrtatcttttaggccctgttcaatttccaaaaatagttgaatgttttattac

SEQ ID NO: 990 - DNA, 101 bp, Homo sapiens
tagcaaaccctcacatcaaggctgtcttcatgcaagtgtgaaaaccagaaygacccttcaaaagttttcctggccagaataactctctcatcagataatag

SEQ ID NO: 991 - DNA, 101 bp, Homo sapiens
ttgaaatctgaaatcttagaaattaactacaaaactgattttgtggacaayggtgtacatagcaatacatgttctcaaaagagacctttcacctacagtct

SEQ ID NO: 992 - DNA, 101 bp, Homo sapiens
gcagtatttcatgtcatatataaatggattgaggcagtattgtcaaaggtraaatattctgccccagagcccaaaaaagcctaactaaaatctgttgttat

SEQ ID NO: 993 - DNA, 101 bp, Homo sapiens
gctctcccagccaggaaccaaaaaacttctccaccagggcctgaaacaccrtgtacttggcactgtatgaaagaagctggtcataccaagaggatggtcct

SEQ ID NO: 994 - DNA, 101 bp, Homo sapiens
gatggtcctatcggtcatgaaacaataggactcgaattctcccaacttcamgaaacacgatggtaaccactggaccatggcaaactgtgcaaaccttcaac

SEQ ID NO: 995 - DNA, 101 bp, Homo sapiens
cagcgagaccgttgattggctgccatttgacctaatggaaactgatcctgstttaattcatagacatgaggactagcagtaagtgggcaattaggtcacta

SEQ ID NO: 996 - DNA, 101 bp, Homo sapiens
cacattactagtttattgagcacacaaattcattgcttctgctaacaattytgattcctacacaatgcttggcaacattgccagttccaacacaagctcac

SEQ ID NO: 997 - DNA, 101 bp, Homo sapiens
aaaacatggggaatgaaaacaccgtattctaaagtctgctatcagatagtsaaagacaaaacagccattattgtctacaattagaatacgggctctgatag

SEQ ID NO: 998 - DNA, 101 bp, Homo sapiens
aattcataggaataacctttgaatgttaactgcagagagataagactcacyggaatggaatttatacagcccgatcacctctcccttatgtttcttcttct

SEQ ID NO: 999 - DNA, 101 bp, Homo sapiens
ttcacattcactttaagaataactaaaactgtccagaccatcaagagtacrcatattcaaaatatcattgtgaatctgaaagacgtccctttacagaagaa

SEQ ID NO: 1000 - DNA, 101 bp, Homo sapiens
ttgcctccagttttctcaacgacaaagtctggaaatttggacactccttasctttcaaatctcatctccagctagtcttactaacttttggttgcacagaa

SEQ ID NO: 1001 - DNA, 101 bp, Homo sapiens
tggtgatgataaattatatacagtgccttcctatacccaaatgatttagtytatgagccagagttccatttcagcatatctattggaaagatgatagtgta

SEQ ID NO: 1002 - DNA, 101 bp, Homo sapiens
caagtttagggtaacacagtgaggaagctggaaaaaatgacatttttttawtgaggtagatattttgattttcatgattttttgtgggaaagaaagaaaaa

SEQ ID NO: 1003 - DNA, 101 bp, Homo sapiens
taaagcaatattaatgcaatattgaattattataatactctcactaccaascaatgataagattcttgagtgggagataaaggaggtagaatcagaactag

SEQ ID NO: 1004 - DNA, 96 bp, Homo sapiens
ggaatgagctgcaaatgtggggcttgatatctcttccagctctctyggcctgttgctaattggtaaattagacctgatattctgccccagaaacac

SEQ ID NO: 1005 - DNA, 101 bp, Homo sapiens
tctagtatgattttccgtggtaattttctgtatgtcacatatactttttayatcctaatatgtggctttattttcctgtcctgttctcttcattttgcttt

SEQ ID NO: 1006 - DNA, 101 bp, Homo sapiens
aaatgcctatatgaaattagagtaaatttgggaagtggttctctttttatwgcaaaagaagtaccagggaacagctctaaaatactcccttggagggccaa

SEQ ID NO: 1007 - DNA, 101 bp, Homo sapiens
gtctggggcctgggaggtcaaagaattcacctacaatcccacagtaaaaayggcagaatcaagtaagtaccaaaacccagatatgcctaggcccagcccag

SEQ ID NO: 1008 - DNA, 101 bp, Homo sapiens
gctggtacgtttgatgctgggtctgatacaatttcagatggaagctgctcragtggaaaactaaggtcattgcctctcatggataaaatgttatttcactg

SEQ ID NO: 1009 - DNA, 101 bp, Homo sapiens
ctttcttaacagagccatttggggcgttggctctgttctttgccttagcarcttgttaggatccttgctctcagcatactaccttgacccattggggatct

SEQ ID NO: 1010 - DNA, 101 bp, Homo sapiens
taaatttgggagagagaccaaaatactcttgtagatgacttgcttttaatrtcttggaagtttaaaggagtacactgaaaattagttactttcctgaacaa

SEQ ID NO: 1011 - DNA, 101 bp, Homo sapiens
taataaaaataatgtagctaaataatttacctttggaatgtaatataggtsttcttcacaaaatgattttttgaacctgtagaaatataagtaatactaac

SEQ ID NO: 1012 - DNA, 101 bp, Homo sapiens
tttaagacctcatagtttaaagcaaaccttatatcacataagtttctcaaygcacataagtaaacataatgatggtaaatccaaatgctatggtaggctca

SEQ ID NO: 1013 - DNA, 101 bp, Homo sapiens
taaccaattcgatcctggtcttgaagccaggcttcgtttgtaatcattcartgcctacttgatgatccttctatagttcaagcattcaatagggaagacag

SEQ ID NO: 1014 - DNA, 101 bp, Homo sapiens
gtttgacttcccacatggccccaaggtaccgtatgtgactcaatagaccaytgctttaataacagtgaatgcatttaatcattctggaatattaaggggga

SEQ ID NO: 1015 - DNA, 101 bp, Homo sapiens
aaatgtaacagcttttattatcatatcccacagcagttaagacattaaacytgaataaactccatccaagtaaatataaatattaaccataagaaatagag

SEQ ID NO: 1016 - DNA, 101 bp, Homo sapiens
aaaaatttcttaccagtccctaaattcttacctgtcattccttaggaagaygaaacatgaataaaagcattagaatgataaaaaacaaacaaacaaacaaa

SEQ ID NO: 1017 - DNA, 101 bp, Homo sapiens
ccaggtagagcatctccttgtcagacttgcagaccttgtcaacagacacgrgtatttaattccacccttcgaaacttccttcctctctaagctcttccaac

SEQ ID NO: 1018 - DNA, 101 bp, Homo sapiens
atataatataggctatttatttggttcaataataagtaccgagtacttacyttaatgattgttcaagatactgttatgtgtagtaattattacaaagtcat

SEQ ID NO: 1019 - DNA, 101 bp, Homo sapiens
aaaggtgatgtgatgttttggaagtttatataaataatgctattccctgcyttctagtgcaagtaacaataacactgcgtttttgtaatgcagctatatca

SEQ ID NO: 1020 - DNA, 101 bp, Homo sapiens
agaaaggtttaattttaataaagatgtgaaaacaggtgagttattgtttgyagtttcagtgtgagacaagatctggataatgtgtcattaaatgcatcatt

SEQ ID NO: 1021 - DNA, 101 bp, Homo sapiens
accaggtttccaagggcaaattcaattcactgctctgtctccagcagttasggttcattcttaggttctgaaatcattccctaaatttcttttatttctca

SEQ ID NO: 1022 - DNA, 101 bp, Homo sapiens
cacaggtaaagtttaaatattgccaaatagcttatttaaatcacttttacrtctttttattagatgaatccacattcatctgcccaccaggccatgaattt

SEQ ID NO: 1023 - DNA, 101 bp, Homo sapiens
ttactgcacttctctggttattgctcagaaatgctgtggatattgacttaycggaccaagtttgggatgggcaagtgaccaggctcagcatccgattaatt

SEQ ID NO: 1024 - DNA, 101 bp, Homo sapiens
ttccttcttgtttccttatatctaggttggaggcacaaattgtctgttaarctcagtggaagcgaagtcactcaaggaactgtctttcttcgtgtaggcgg

SEQ ID NO: 1025 - DNA, 101 bp, Homo sapiens
gataacatgaaaatacagatctagataatagagcaagtggaaaaaactgayggtattcaagatatatttttaatcccattcacttaatattatacaaatat

SEQ ID NO: 1026 - DNA, 101 bp, Homo sapiens
ctaaacctaaaatgagggttcaccatttctagttgccatggcaatgaaccrctttaatgacaaggcaggcaaaatgaggggtgggggaatgatgtgcaaat

SEQ ID NO: 1027 - DNA, 101 bp, Homo sapiens
agactcatctaaatgaatcaatctttttctctaagtttgtttcacactttyatctatgacctatttgaaacagctcttgggaactacaaaatgagtcctaa

SEQ ID NO: 1028 - DNA, 101 bp, Homo sapiens
taagagaatttatagtgtgtcaacagctaaatgatttttccagtaatattytcaacacagatatctttgcaggatatccttgcccttcctgtaaagtttca

SEQ ID NO: 1029 - DNA, 101 bp, Homo sapiens
gatgttcctctggctctcctaggctcctgcttccctaacagttgcataaaygtctatcatgttcagatcacctgttatttatttccatagctcatccttta

SEQ ID NO: 1030 - DNA, 101 bp, Homo sapiens
cagaaatgaagaaaaataatccaagaatgatttaatttgagaattcagacrttgagtaataaacatgtggtactaattaacaagaaagttgataaaagcgg

SEQ ID NO: 1031 - DNA, 101 bp, Homo sapiens
cctgtttttaaagattcatcattattagtggaaaatgtatgtttatacaakatctaaggacagtactttgggtgaatactgtcagattcctggagggaaaa

SEQ ID NO: 1032 - DNA, 101 bp, Homo sapiens
accatcaattctgccctaaaaagaaaatggcagtaacatttcattttgtaytgcaacattttctattttacatcggatctaaataagctgaacacttaact

SEQ ID NO: 1033 - DNA, 101 bp, Homo sapiens
aatcctgtaaaaatgatgtagctggattttattttaaattctaagcagatyatgttttcatttttacaaagagattccatctatttacatataatgagatt

SEQ ID NO: 1034 - DNA, 101 bp, Homo sapiens
ggtgtttggattgtgggggcggatccttgatggcttggtgctgtcttcgtragaatgagtttttgcaagatctggtcaattaaaagcatgtggcacctcct

SEQ ID NO: 1035 - DNA, 101 bp, Homo sapiens
agaattgaaataccagataaaagtgaaatgcaaagtgatatttcggtgccrttacattcggttttgtaatatcagcaacttttagataacattaatatgag

SEQ ID NO: 1036 - DNA, 101 bp, Homo sapiens
aaatagatggaaactgtttggggagcccatgaagctactacagtgagggawcataggatatatacacagcctgatcttgagcccgtttggacttttctgtg

SEQ ID NO: 1037 - DNA, 101 bp, Homo sapiens
atcctgagcccactctattttatggctctcacgaatgtgattatcttggtrcccttaagccacagctgatattttgggctcttcgagggtggaatggttcc

SEQ ID NO: 1038 - DNA, 101 bp, Homo sapiens
acagagtgataaacagtttaagagaactcaggccaatactacattacgaayactgcacagtagcaaaacctatagtcatgatgaacagccaaagtcatcca

SEQ ID NO: 1039 - DNA, 101 bp, Homo sapiens
actcaggggagaggagaggggatgctaagttatataccaagggcccactaygaaatggaacaagcattttgtgatttctgaatatacatgtagcattgtga

SEQ ID NO: 1040 - DNA, 101 bp, Homo sapiens
tacttcaattcatctattaattcttccccaatacattgtttgagctctttygcatttattttatttagacatgcactaaagatagttggctgctttctaag

SEQ ID NO: 1041 - DNA, 101 bp, Homo sapiens
tttaatccaagtcagtgactctctaagtcccttcatagtgacttgctctcyagttctcgggacgctgcaggccttgtgaagagccaaacagatgctcagga

SEQ ID NO: 1042 - DNA, 101 bp, Homo sapiens
tctgggcccttacctaaagcttcagctccatttttttgctgctctttcatwaaatgtgaggcagcacagtgcagaggtaaagcacaggggagagaagcaga

SEQ ID NO: 1043 - DNA, 101 bp, Homo sapiens
aaagctatctgaagcattcaaatagcaagaaattgaaaatgacctaaaggracatcaataatggaatggaaaaatataatgtggcagaatgcaattcagtg

SEQ ID NO: 1044 - DNA, 101 bp, Homo sapiens
agtaataattcttctagaagagaacatagagaaatatctttatgaccttgmgattgccagtgagttcttcaacaggacacaaaaattactactaacaaaga

SEQ ID NO: 1045 - DNA, 101 bp, Homo sapiens
ataatacaataatgaaataaaaataaagtcattcatcaagaagcctgtatytattttcttcatgtctgaaggttgttaaatcctaattatcctgaactatt

SEQ ID NO: 1046 - DNA, 101 bp, Homo sapiens
cctgaactattttcatactgctgagcagccaccacttatgaagtcagtaawtaatattcaatttgcctagagctttcagatttgcatgttaattattgatt

SEQ ID NO: 1047 - DNA, 101 bp, Homo sapiens
cctagaggaagtatgtaaagaagaggtaaagggaagtatttgagtaaatayagcctgaacaccaatcagagataggctttggaagaaaagacgtcctccct

SEQ ID NO: 1048 - DNA, 101 bp, Homo sapiens
tcccgccgccaacccagtacccgtatattcttctagagcacctgcacagcrtttcttctcctactaggctagtacttgtctcatccaaactcccatttccc

SEQ ID NO: 1049 - DNA, 101 bp, Homo sapiens
ttcatgtggcaaccaacctaggggtgtgcttgaccgcattcttgctttcaycacggaactaaagccgttatgacattaatcaacaacttttcaatgtgatc

SEQ ID NO: 1050 - DNA, 101 bp, Homo sapiens
gtaggaaaatattacaattgtactcttctgtcctctgagtttctttcagcrtgtcccactgttcaaatctaccagaaagtcagaggacaaggaaacctgtt

SEQ ID NO: 1051 - DNA, 101 bp, Homo sapiens
caagtaatgactgagagaaagggagttttcgatggttgggagcacctacarttaaataaaaacaaccaccatccaatgtaattgggcataaataagacata

SEQ ID NO: 1052 - DNA, 101 bp, Homo sapiens
aaattctagagttgactaaagatttctttatttgaaaaattaggccaaatmatgactttacaaattgatactctttggaatgaagactcattttgccatga

SEQ ID NO: 1053 - DNA, 101 bp, Homo sapiens
taggcacagttaaccgccaactctttggtgtgtgttctatttacatttgtsgtaggtttccatcagctgtgtttatgagcttgtttctcttgctactctaa

SEQ ID NO: 1054 - DNA, 101 bp, Homo sapiens
tactgttatgagaattacagataatatacacaaaaactccaagcaaaatarcattgagtagacacataaagtttttattattataattttgtgtcaaagca

SEQ ID NO: 1055 - DNA, 101 bp, Homo sapiens
taatgtaacatggatggatgcctattttaggactaagtgagagtaactgtrtaaagcattttggaagacataaaggtaaatgaaatgtaagcagtactttc

SEQ ID NO: 1056 - DNA, 101 bp, Homo sapiens
atatcaattcatacactttaagtaggtacatttcattacatgttaattacrcttctataaaactgttttacaaacgaaaataataatgtagaattcagtgt

SEQ ID NO: 1057 - DNA, 101 bp, Homo sapiens
gattcaatttacacaagaatctagaaaatacaaatttatctataatgacasaaagcaggtggctgctagagcacaggggaaggtcagggaggcagggattg

SEQ ID NO: 1058 - DNA, 101 bp, Homo sapiens
atttcagaacaaatgtttagtttttcattcttttaaatgttccataaagaygatagagacttagaaacatggttatcttgtttggaggcagcattttctca

SEQ ID NO: 1059 - DNA, 101 bp, Homo sapiens
acatcccatgtgtaatagcttggtaaatctaacacatgattaaacactgtygtactcttccttagagcaagttctgaagtcttctctaatgctccttctag

SEQ ID NO: 1060 - DNA, 101 bp, Homo sapiens
tactcttccttagagcaagttctgaagtcttctctaatgctccttctagcyttatctcccattagatgtatataatcccacattacaagaatattacatgt

SEQ ID NO: 1061 - DNA, 101 bp, Homo sapiens
acccaatcaattctgtttacttccagtaataaagccctttcccaatcgtawcattgtagctttttgcctgtttttgaactttatatacatgaaatcacaca

SEQ ID NO: 1062 - DNA, 101 bp, Homo sapiens
tgtgattttcttaaattacagcaaaagcatatttagtgtatttaatgggtyctttgaagatagaaagacttatattatcagtgttttgtaaaaatgggatt

SEQ ID NO: 1063 - DNA, 101 bp, Homo sapiens
cccattaaatacactaaatatgcttttgctgtaatttaagaaaatcacgayaactgtctattatggtttctagatggacatctttaccatgaagtttacag

SEQ ID NO: 1064 - DNA, 101 bp, Homo sapiens
tagtcacgtatgttttaaataaggcttttatttaactcttctgctggttcygtaatctagcaaatttggcagtaatttttaaagctaactcatttaggagt

SEQ ID NO: 1065 - DNA, 101 bp, Homo sapiens
gaaattataataaaatggattataagatactttattcaaagtcatagattygtagagtttttcacagatttctgtttcctcttgaaattcccatgtccatt

SEQ ID NO: 1066 - DNA, 101 bp, Homo sapiens
ctggaagcgaagtttctgagttttcagattatggcagcagtggaggtttgycactaggatttcccctcagtaagaacttgctgttcagctgcaaggagtac

SEQ ID NO: 1067 - DNA, 101 bp, Homo sapiens
ctgcctgacgtttgttctctggttgctcctccaactgccacttaggttccrtgattaaaattgagggttgggtactgttcactgagtcctgtaaaattcac

SEQ ID NO: 1068 - DNA, 101 bp, Homo sapiens
gtgctatctttgtttataatctgaacccacattttaaaaattatatgcagyttttaggatggatgtgctcccttttcctttaggtgagaatttgtcaaggg

SEQ ID NO: 1069 - DNA, 101 bp, Homo sapiens
tatcccatcttacctttcagtatagcagtagattcttactgagcagaagawtaccattttgagtaagtgggctttgatagacctgcacaactctcagagtt

SEQ ID NO: 1070 - DNA, 101 bp, Homo sapiens
attatgagtgattttcatattttacttttttccctcataagttttctaaartcatccatacattgctttcatataaagaaaaaaatccctcaaatttagaa

SEQ ID NO: 1071 - DNA, 101 bp, Homo sapiens
aaataagccatcctcccccaacactaatgaccataaaacatgtttatgacyacctaaagacagtaaacaatagttaaacatcaacaaccaaacctccgtgg

SEQ ID NO: 1072 - DNA, 101 bp, Homo sapiens
agcattttggagaagagatattcaacctgtactgtaccaacactgccttgrtttgataacattcatcttaaagcacccagtgctagtaaaagaacataatc

SEQ ID NO: 1073 - DNA, 101 bp, Homo sapiens
ctttttaagaacagtgaatctttgagtcactagaggttctattaaagggcytgcgtttaaactgttgggaatcctgtaaagaagaatcatagattggatga

SEQ ID NO: 1074 - DNA, 101 bp, Homo sapiens
acatattcgagttacatggattatttatactttttctttataatcatatcmtgtgttgagggtattttttttcctttaataatcaagaaatgcctgctata

SEQ ID NO: 1075 - DNA, 101 bp, Homo sapiens
cattccttctgtatcttctgtgactgcttgcacactacaatggcagagtcraatgcttgcaacagactctataccacctgcaaagcttaaaatattggcaa

SEQ ID NO: 1076 - DNA, 101 bp, Homo sapiens
attttgggggcccaagatattttcctttcacactagtgaacagaacatagygaggcagctgttatcagttgaatcagttgtagtggacatctttatgcatt

SEQ ID NO: 1077 - DNA, 101 bp, Homo sapiens
ccacctgcttccaagaagctctcagatctttctttattcatttattagtcsagagcacaaacttctaaggattttcatggtagctagcaaactgccattga

SEQ ID NO: 1078 - DNA, 101 bp, Homo sapiens
ttattttttttcatgtagcaatctattttggaaatattttataatctgtcrtgtagagctacttcattctttttaatggctgcatagtattctaatgtttc

SEQ ID NO: 1079 - DNA, 101 bp, Homo sapiens
gtgggatacacacaagggatgattgccacctgagctagcatgatagcctaytgagacgagaagagatccatagatttgagataattcaaagatagagtttg

SEQ ID NO: 1080 - DNA, 101 bp, Homo sapiens
tgataatttgcttaaagtcttcattaagatattttcatgactgtgaaaccraatgactatatttatgaatgtgtttacttctggcagaactttcataggct

SEQ ID NO: 1081 - DNA, 101 bp, Homo sapiens
gattacctcatagagttgttgtgaggaccaaatgaaacaatatactaagargtttgaatgtacctggcatattgttaatttctcaataaatgtaggtcatt

SEQ ID NO: 1082 - DNA, 101 bp, Homo sapiens
cttggattagaaaaacaacaagaaagcgtgggaaagaggaaggaggatttyttaaatagagcacaaggtaagtccaaaattatcagtaaacacaatacaaa

SEQ ID NO: 1083 - DNA, 101 bp, Homo sapiens
gtacccagtgacaggcctgcaccagtggccggcccaccaccatagaatccraggcacagaggctgggacacaagtgccaggctggctggttttgaacctgg

SEQ ID NO: 1084 - DNA, 101 bp, Homo sapiens
ttcctttttgtatctatacttggtcatcatggtacttactaatttcctctyctttggattttctgtgtttcatgggagatttgggggatggggcacaatgg

SEQ ID NO: 1085 - DNA, 101 bp, Homo sapiens
ttggcccagaggctgtagtttgccaaccctgctctacataattttcttttygcattcctagttcaaggttacataatttctttttcttagtttttccttcc

SEQ ID NO: 1086 - DNA, 101 bp, Homo sapiens
cacagctcttgccttctgtgcacccacaggtttaccatcatgtggaagttstcaaggtttatggcttacaccttctggatcagtgtcctaaaatgtatctg

SEQ ID NO: 1087 - DNA, 101 bp, Homo sapiens
aaatattacagaagatgattatctttatgcctactatgtgccattcaccaytctacaggcttcatacaggtaaaatacctataatcatgtttggctttcct

SEQ ID NO: 1088 - DNA, 101 bp, Homo sapiens
aaaaaaatctcttccaagtttcaaagagcacttccataattcagtatattwatcagcatgtcaactcctccctgtccccaacactacttagcactactttt

SEQ ID NO: 1089 - DNA, 101 bp, Homo sapiens
tgaggcagtagagttaaaagcgagggctatagattcagagaagcaagttgkttacattctgagcctgtttctccacctgtaaaatgcaaataataggacct

SEQ ID NO: 1090 - DNA, 101 bp, Homo sapiens
gggccagttagcatttcctcctctattagatgaggagttcagccaacttawagaaggaaactgttgtgttaaactgtaggaggttcccttaccctagattt

SEQ ID NO: 1091 - DNA, 101 bp, Homo sapiens
gcaagtgcaggtgagaactcttgcctgtttcattgatattcttaaatgacragacaatttcctttggttgtgtcctgtcagcattttcccccattcccagg

SEQ ID NO: 1092 - DNA, 101 bp, Homo sapiens
gctcttacagtcgtgacactgacttgagggaaatatcatggttcaaaggckcattgacaaaccaacatccagtatttctttcaagccaagtgggtagaaaa

SEQ ID NO: 1093 - DNA, 101 bp, Homo sapiens
gtgtgcttatgggaagtcaattatagagaagagtgggaagcaattttatcmgcccactcaaaaaattgaaagatgtcaggggaaagaaagcaggctttgga

SEQ ID NO: 1094 - DNA, 101 bp, Homo sapiens
cctcaaatctaatagctgtccccaaatacgtgtatatataggatcagttcrctataggtaccgtaattcttaactgaagaaattgttcctgcaagagaaag

SEQ ID NO: 1095 - DNA, 101 bp, Homo sapiens
aacaaatgagtgaattttatttatactaatttttataggaattataagtaycttgagagcaggaccatgtcttttcctttcaatccatccctgggactagt

SEQ ID NO: 1096 - DNA, 101 bp, Homo sapiens
tggtaccaagcatgtgcccatacaaaaaaggtaaagaaagacagtttattrtagtagaaaaagtcctgactttggagtcatacagcttactgcttatcaac

SEQ ID NO: 1097 - DNA, 101 bp, Homo sapiens
gttctttctgctcagaatgctcatccccagtcacctagcaaagtcaggtarcgattttaagcagcaagaagaagcaactaactcaggatgccagcagtttg

SEQ ID NO: 1098 - DNA, 101 bp, Homo sapiens
cagtcacctagcaaagtcaggtaacgattttaagcagcaagaagaagcaaytaactcaggatgccagcagtttggggtctgattttgccattgattatctg

SEQ ID NO: 1099 - DNA, 101 bp, Homo sapiens
ttgttgttcatataaattagagaactcagttcttttcgaatgtatcatacygctctttctctataggagataagagtctcaggacaatctttgcagattta

SEQ ID NO: 1100 - DNA, 101 bp, Homo sapiens
atgttagaaattttatcaaatgtataaaacctctgccagagttcatagacyatattcacattaaacacactgatatacaactttttcattgtagattagtt

SEQ ID NO: 1101 - DNA, 101 bp, Homo sapiens
tatatctaatttttttctaccatatctattgttttgcaatacgcttttcawactttttgtgtttgaattttctaccctaatatgaaacatataattttgtg

SEQ ID NO: 1102 - DNA, 101 bp, Homo sapiens
tgattgactagagatgctgagcatgcatgtctgtgacaagaaaggaccaasgcaacaacaaataaacagctaagatttgactggagtgtcaaagggagagg

SEQ ID NO: 1103 - DNA, 101 bp, Homo sapiens
tatgcaggattctgggggagatgcctgatttgcaaagctgaccagcaaaaygtttctaatgggacctctcccagaacatggagttcatttttatccccttt

SEQ ID NO: 1104 - DNA, 101 bp, Homo sapiens
aaaccacttttcatttttggaagttttgaatgcacttgacctctctgaaaygatcagatatatagcatattggaaataaggaaaatataggtaaaaatgct

SEQ ID NO: 1105 - DNA, 101 bp, Homo sapiens
cttcaggtaaatgaaaatccttaaattaagacatgtttctgcgaaatcacrtatctataatttctcatttctatatattttgtgtcttttactctccctct

SEQ ID NO: 1106 - DNA, 101 bp, Homo sapiens
caaagacatgatagctgcattgttctttttattacctggcaagactgcccrattgtctctgatgttcagatggaaaaaggatagaaaagatgccagaatca

SEQ ID NO: 1107 - DNA, 101 bp, Homo sapiens
atttggcatgtgctacttcagtctcctctgatgacttccccactttagttstcatagtaactgcccttcactgctcaatctatgcattacttcctctagaa

SEQ ID NO: 1108 - DNA, 101 bp, Homo sapiens
cccagccatgtggaactgtgaatcaattaaacctcttttccttataaattrcttagtcacaggcagttctttatagcagcatgaaaatgaactaatataga

SEQ ID NO: 1109 - DNA, 101 bp, Homo sapiens
gttcataatgtgttgtatgagcccacccttggctttggcagacttcctgtygatgggccaaacggtgttgcccggctaagaaggtggtgttctggtttacg

SEQ ID NO: 1110 - DNA, 101 bp, Homo sapiens
gagggagaagtctctagaattaaaacatgaggaaaaccactgattagaccrtgattctcactccttagccaggcaaaagagcccagagattaccagtctta

SEQ ID NO: 1111 - DNA, 101 bp, Homo sapiens
tataaattatatccatttagattttgctttgagagaggagtatttggactycaaggtctttcatttgtggcagccagattaaaatcggagaacaatttctg

SEQ ID NO: 1112 - DNA, 101 bp, Homo sapiens
gtgatcactcaggaaattaattttacgccttgcagtgtggctatttcatcsgagtctggaagtgaggagtgaccaagagagaacaaaaggaagggtggtgg

SEQ ID NO: 1113 - DNA, 101 bp, Homo sapiens
tctgtaattacccaggctcagatattttgttatagcagcacaaacgatacsatggcatttgtgtatgttggttgacattctgtatgcaaatactcatgcct

SEQ ID NO: 1114 - DNA, 101 bp, Homo sapiens
aaatggtttcaagtttttttttttttttgacctttaccctattcattgtcrtaaacaccctatacttccccaaaagtaaaagctctaccaagtaggcctga

SEQ ID NO: 1115 - DNA, 101 bp, Homo sapiens
catcatgttgccacctgataggtaacttttaacaaacagcaggtgcaaacrtgggactgatagaaacaaacaacatccttgcaaccgaaggggctcaacag

SEQ ID NO: 1116 - DNA, 101 bp, Homo sapiens
catgcaccatctattcaaatttctcatctcaggagcaggcacatacctaayaggtcctcaataacgatcgtcctaccacatcaataacaatgtgatatgct

SEQ ID NO: 1117 - DNA, 101 bp, Homo sapiens
tctaacttcaccaatggctccacttgcaaatttaagcattctgaacctacratttcatggtttaggacttgcctgaccatcatcatctcctttgctgccaa

SEQ ID NO: 1118 - DNA, 101 bp, Homo sapiens
agattggccatgttacacacaacgttcgcgtctgtctgtaaaactgctgamttgtgttgtctactgctggctccaacattttgcaggatcataattaactc

SEQ ID NO: 1119 - DNA, 101 bp, Homo sapiens
tcccacttataagtgagcagtgagatcagttatcaactcagcacgacttcraagggtcaggaagatgctcttagagtaacattaatctatctcactggagg

SEQ ID NO: 1120 - DNA, 101 bp, Homo sapiens
agatggatggcaatactaaaaccattacaagcagaaaggacagatacattmcatagcagagaggaaggggatgtggtgagagcaaagtactgcaaaatggc

SEQ ID NO: 1121 - DNA, 101 bp, Homo sapiens
agtggcgagttcaagtgtgttcagtggtaagttcaagtgtttggtggatayaggaatactggatgcgggaacaagcccggagccttggagaccttcgggga

SEQ ID NO: 1122 - DNA, 101 bp, Homo sapiens
atcagtcctctcatctgtaaaatgggaaaagttatggttatctctcataaytgttgaaaagaataaaccagataagatacagaaagcacctaatgcacagc

SEQ ID NO: 1123 - DNA, 101 bp, Homo sapiens
ggggaattgaaacagacagtttcactggaagagtggtaaacatggaataarttgccaaccatgatcgtgatgcaaatgagccagaaaggtgacttgaagga

SEQ ID NO: 1124 - DNA, 101 bp, Homo sapiens
gttattcctatgaataaaagaaaatacaaacagcgtagtgtactgagaacyttaattccagtggaaagaggagataagagttagaagaggacaaagctgaa

SEQ ID NO: 1125 - DNA, 101 bp, Homo sapiens
cacactgttagtgctccataaacagttgttcttcagaagatccaacagtcsaatttctgagctttccatgtatatttgttgaaccttctagattacctttt

SEQ ID NO: 1126 - DNA, 101 bp, Homo sapiens
aaactaccctctttaaagcattctggaaataagtccaatctcagtcttgtscttcagagctttcaaaatgtagaccctatggagatggaagctagcaccaa

SEQ ID NO: 1127 - DNA, 101 bp, Homo sapiens
taggtataaatgttaaggacttgaagtatgaaaaatagtcccaacttagaygaccattgattttgcatgtgtgatactgctgctaactcttaatcactaac

SEQ ID NO: 1128 - DNA, 101 bp, Homo sapiens
ggagaacatgctacaacaaacagcacatttagaaacccaggattggcatgragaccttgaatccagggatacgtgcagcagatgttactaggacccaaacc

SEQ ID NO: 1129 - DNA, 101 bp, Homo sapiens
tcttaactgttttataaagtccaaaagtggttggagaaaagaaataactamtggtattgtgatatggtgagaaagataatgtgagagtaatatttgtctgg

SEQ ID NO: 1130 - DNA, 101 bp, Homo sapiens
tgaacttaaacccgagtatactagaaatataaattattatatacaaatggrtgtcttttacagcaatagactccagcctaaattgatggtaggggttttat

SEQ ID NO: 1131 - DNA, 101 bp, Homo sapiens
aagtactgagtagactcttgactttgcccagaacatacactgccattagarcttgatcagtcttaacatcagtgagtcaaaatatgtcactgtgtgatgcc

SEQ ID NO: 1132 - DNA, 101 bp, Homo sapiens
gtgcagtgacaccacatggtagccttggagtcagtgattcacatctgaagraagggagtatagagcaaatctttctttgccctaccccatcccaccccatg

SEQ ID NO: 1133 - DNA, 101 bp, Homo sapiens
catgaagtgcagctacagataagaaagcagtattagagaatttaatttgtwaaaatcacaaagcaagaaagaagcgagtttgaattcaaatacaatcaatt

SEQ ID NO: 1134 - DNA, 101 bp, Homo sapiens
ggcctctttcctgtgcctttatcagggtaaatgacaaagtaaaatagtaartacccatctatgaataacatagtctagttctggttcatttacttggagat

SEQ ID NO: 1135 - DNA, 101 bp, Homo sapiens
ttttatagaattacataatctgtgtgaaggttttgatttaagctgtgaagrtttttatttaagcagagtggcaacgatcaggttgtgaataacagacaatt

SEQ ID NO: 1136 - DNA, 101 bp, Homo sapiens
ttggccctacaaatcctctatacagaaagtgcaaataatacacaagtgctyatcaggttaatctgagtggtagctgtgtccacgtgtgcctgtccatgcat

SEQ ID NO: 1137 - DNA, 101 bp, Homo sapiens
ccatgccccaggttattttggtgcatatggttgttggaccgcattagaaaytagtctggttcaagcacttatttaatagatgagtgaactgtggaccaggc

SEQ ID NO: 1138 - DNA, 101 bp, Homo sapiens
ttatgtcccatacaaatcctgccttgcgtatcttttcttcttgatacagcrgagtatttttatactttactattcacagttttagaagagactgtgctgca

SEQ ID NO: 1139 - DNA, 101 bp, Homo sapiens
gttatgtggcaaaatccagtaaaatttaatgtcaacacaccttatcatgtrtccattgaatttctcgggagaaatacatacactaaaagacatgaatgaga

SEQ ID NO: 1140 - DNA, 101 bp, Homo sapiens
agagaggcatcattaatatagaaaacatctcatgagctttagaattctgasaggttcattcttttatagggttattctattacaggcttaatatcccttat

SEQ ID NO: 1141 - DNA, 101 bp, Homo sapiens
tagaattttcactttattctacctttgtactatttgcattttattgtctgrataccaaacttatgcctggctttattttcttttaataggacaatatttaa

SEQ ID NO: 1142 - DNA, 101 bp, Homo sapiens
tttaaataataccaagcttgcttccctttgtaactttcctcatgctcttasacttctaatctttttaacctcgaaggctttccttaaatgctattgcacac

SEQ ID NO: 1143 - DNA, 101 bp, Homo sapiens
acataccagaattttctactgtactatgctagactattaataactcaaatktacatcccaaagggcaacactgccccaattcaaacttaaaaacagctgtg

SEQ ID NO: 1144 - DNA, 101 bp, Homo sapiens
cagcacgcagctgcagctgtggtgctggttgacactccccacgtgagctcrgtaggcttaagcagattccagctgagagactgttgagaatctgcatggct

SEQ ID NO: 1145 - DNA, 101 bp, Homo sapiens
tctatttccccaaaataaccctgtgaaaatgttgagactgagagattgcayggtacttacctcaaagtctcaatagccataaaataagagagctagaattg

SEQ ID NO: 1146 - DNA, 101 bp, Homo sapiens
taggcatgcctgccttgaatgactgaatacttgcccgcatagagaaatcartcaactctgtggtattcctcagctcagaaaagtgaactaactgaaaccct

SEQ ID NO: 1147 - DNA, 101 bp, Homo sapiens
aataagtgttcttgcacctccaaagttattctcacaaaacgaggtgcaatkataagttaacatctaggtttcagttaccacttagctgcaggggagtttta

SEQ ID NO: 1148 - DNA, 101 bp, Homo sapiens
atttcctaatgtctgatggtatgcttgaatgtttctttgtgattaaatgtraacaattgctcctttaaggtaaaggtctgtgtatatgtgattaatcagat

SEQ ID NO: 1149 - DNA, 101 bp, Homo sapiens
acaattgctcctttaaggtaaaggtctgtgtatatgtgattaatcagattraaatgaaagtgcagacagctcacggatgcctagttatcagaatgattgat

SEQ ID NO: 1150 - DNA, 101 bp, Homo sapiens
agacactaggccagccagggatttcatacatgttaattcatttgatctaamtctcagaaccaggtacatatacccattttacagatgaggaaaattggctt

SEQ ID NO: 1151 - DNA, 101 bp, Homo sapiens
gcaatggccctgttcctttatcttacactgtgcttgaattgtaaatacaasttgtgaatttattagtaacatttctagttattgtagtttctaagtatgag

SEQ ID NO: 1152 - DNA, 101 bp, Homo sapiens
tttatgttgtagagaagaacaacaaaggcagaagaggaaactgatacagawtgagccctcaaccagtggcccagaactctgccagatatttttatgttcat

SEQ ID NO: 1153 - DNA, 101 bp, Homo sapiens
gaggaaataacatcagcagttaatcaaatgctctgtaaacagaatgtaccrtggctttctctcaaaggattagataattgcacatgtgaacactcataaat

SEQ ID NO: 1154 - DNA, 101 bp, Homo sapiens
agatggccagttcaccctctgcggtgagcagaaggccagaaacagcgaggytcccaaaggtcgtggatccttcttaggatctgcagctcctccgagccccg

SEQ ID NO: 1155 - DNA, 101 bp, Homo sapiens
ctgaagtttttggtttcaagtctctggtcagaaccctagggcagaccagartttatgatagctcaggtcatgggtgtatcaaacaccacactgagggcttg

SEQ ID NO: 1156 - DNA, 101 bp, Homo sapiens
ataaactaagatgtggcaggaatttatgatatgatcctatgtgtgaaataygcttctaatgatcctagtctaagctgagaaaagttgtgtagcctgatgct

SEQ ID NO: 1157 - DNA, 101 bp, Homo sapiens
gtaattatgatatagatggtatgttttccagcaaaagcagtttgaacgtcmaggaagtaggagtaggagactcactggagccctttcaaggtacctctgcc

SEQ ID NO: 1158 - DNA, 101 bp, Homo sapiens
cttagctgtaaatattgtctttggtcctcatctattttggaactgaaggamttaaggagagaaacctgggcaaaaatttaagaagctgaaaacagttaagt

SEQ ID NO: 1159 - DNA, 101 bp, Homo sapiens
taattcagagcagggcttacactgtttactacagtgaatatttcacagtckaattgttcataatagaaggaaaagggtcctatgtccagaagctttggtga

SEQ ID NO: 1160 - DNA, 101 bp, Homo sapiens
gcagctccaggactcacaacccaggtgtaaagagaagcactgtttcctaaytgttgcagataaagtccaaggacagacattccttgcctctgaatggcccc

SEQ ID NO: 1161 - DNA, 101 bp, Homo sapiens
cagcgaagcgcttcagccagtacccggcatgtagctggtgcttgagagacrttagctattatcatacaaatggtgctccaaatattagcattggaatgagc

SEQ ID NO: 1162 - DNA, 101 bp, Homo sapiens
gggctggagcagtcgtaacgaaggtggtgggaagtgctcaggttcgggatrtgttttcaagataatcctgttggactaggtgtggcatgtgaaagaaagag

SEQ ID NO: 1163 - DNA, 101 bp, Homo sapiens
atcacaattgcaatgtcccttttaccatgtaaggtaacattcacaaatccyggagattagagcatggatatcttttgcaggaggtgagaggaaagcattat

SEQ ID NO: 1164 - DNA, 101 bp, Homo sapiens
ttcctcatgacagcagataatacatagttggttcaagaatatcaacttttmttattatgtaactaagctgtttcatcagtcaataattttcaaatattaat

SEQ ID NO: 1165 - DNA, 101 bp, Homo sapiens
aatcctcaaaaggataactctcctcatcagagtttagagacttaggcattygttcttatcaggtttatctgtagcgggaggagatgctgcccaggagcctg

SEQ ID NO: 1166 - DNA, 101 bp, Homo sapiens
agaaaacgtcaccagtgagaagatctcacagcaggttcagagaggcatgasagcaccctcagtcacagccagagcaaaactcacggatttagtgaacagga

SEQ ID NO: 1167 - DNA, 101 bp, Homo sapiens
actgatttcttagacactctaatatgatatgctttctggaaggataaaacraatacatatgggaaaaagtacttgagaccaaggccagcatcaattccaga

SEQ ID NO: 1168 - DNA, 101 bp, Homo sapiens
ttccctattgcacttgtaagcacttttttcctatactatcagatcacaatsaacattacagacaagatatacaagagtctcagcccttccactgtattggg

SEQ ID NO: 1169 - DNA, 101 bp, Homo sapiens
gtgtagttttatagttgtcacacgtttggtatttctcgttatcaagcatakgtggtatagtagcagaagtcaaaaatcatactgtcctaaacctgcaaatc

SEQ ID NO: 1170 - DNA, 101 bp, Homo sapiens
ataaattattaaaggacaaagaaaacgatcaagtaatttttgagtgaaaayatcaagtagataaaaatcccaagaatgatattagataaataaatggggat

SEQ ID NO: 1171 - DNA, 101 bp, Homo sapiens
gggggaagtgacacaaaaacacaagagactaggaaagaaagttgaaatgamattgtctattgatataaaaaggagaagcaggaaagagaagagagttgaga

SEQ ID NO: 1172 - DNA, 101 bp, Homo sapiens
aaagttattaatgtgttttaattgccaaaactaatctgatctcagagccaraacttctcctttgttggcttagaaataaattattagcaacagtttgtgct

SEQ ID NO: 1173 - DNA, 101 bp, Homo sapiens
tttctccagggacagttgctgaagcttcatcctttgctctcattctgtaartcatagaaaagtttgaaacattctgtctgtggtagagctcgggccagctg

SEQ ID NO: 1174 - DNA, 101 bp, Homo sapiens
atttttggagtgaaaagggaagaatgtttctttccctaaatctggaaaatrtaaaatactgctcaaaatatgtatgaaaaaataaacataagtggggtaaa

SEQ ID NO: 1175 - DNA, 101 bp, Homo sapiens
acacatgtgctaatgcttcagcttactgaagttatgagttctttctttgcrttttctaaattaatacatgacaactagcaaacacaatttttttaaaggaa

SEQ ID NO: 1176 - DNA, 101 bp, Homo sapiens
atggagcaatctctcctacataaaaggagagattgcggtggaattaggtaygagggatggagaatctctttcctctgttcaccatggcagatacaacttgt

SEQ ID NO: 1177 - DNA, 101 bp, Homo sapiens
tggccagctaagaaggaagcatctctgggagctttgaatgtcaatataaarccttatttgcacagttgtgcacttttggctgacttgttcagtggaccatc

SEQ ID NO: 1178 - DNA, 101 bp, Homo sapiens
atatgatttaagattgcaaaatgttactcagtttccaggtgcagctgtttsaagtacggtattaaatcatgagtatcttcagagtcatgaactgaaataat

SEQ ID NO: 1179 - DNA, 101 bp, Homo sapiens
tgtttatacgggtgtgataacaaatggaattttgttgagtccttctcatarctggttcaatgtatccataaacctgtcttgtggttatttatactgttcct

SEQ ID NO: 1180 - DNA, 101 bp, Homo sapiens
agtgtccttacttctcccctgaccactcaaaactaaattccctttcctatraagaagtgtgtcattcatcaagcacagggggtggtgaccatagcaacaaa

SEQ ID NO: 1181 - DNA, 101 bp, Homo sapiens
tgagcttctggatgagtcctttagcttctccagtactcaggttcctcatcyttaagaataggattcgatactaatttattattctgtagccagtgatgtat

SEQ ID NO: 1182 - DNA, 101 bp, Homo sapiens
attatgatgctgaaaatcaaaacaacaactgcactctttccaaattttcgsatttctcattatctagcatttgaataaattccttccgaattaaagcttaa

SEQ ID NO: 1183 - DNA, 101 bp, Homo sapiens
taagatttttttaaatattgttttcatctagacatttcacttgggtcttayatattccatttctcttctcatcatgttcaagttttcttctatcttgtact

SEQ ID NO: 1184 - DNA, 101 bp, Homo sapiens
gaacttcatgcattttcattaatttggtctactaattttgaacatgattaktaagagtacacagaaggttcatcaaaagctttatgatccagtgatgcttc

SEQ ID NO: 1185 - DNA, 101 bp, Homo sapiens
gcttaaaaaaaatcaatccacatatgaaagagtgcagggtttagacaattmggatgattgaattacaaatgttttgatgcttagatgctggaaatcttaga

SEQ ID NO: 1186 - DNA, 101 bp, Homo sapiens
gggccctaatgctctgagaattatcactgtaacatagactcatgactttaygcttctctggccccagtgagctcccaatcccacttgtggaacaggtgaat

SEQ ID NO: 1187 - DNA, 101 bp, Homo sapiens
ctctaattttctgtttctataaggttgattctgctccctctaagactcagwtctcttaatactattccaaatataggcagagaatgcaaatactgagcagt

SEQ ID NO: 1188 - DNA, 101 bp, Homo sapiens
tatatctataggtttttataagaaaatgacagagacagtttattaatattstcagacaaagagaagttatgaagcattgtttaagacaacgtcaaagaatt

SEQ ID NO: 1189 - DNA, 101 bp, Homo sapiens
gaccttaccagtttgctaaggttgaactagaccttagcagatcctgccagwttgcaccttattagcagtataattcaggtcgccatgtttccttgtcaaca

SEQ ID NO: 1190 - DNA, 101 bp, Homo sapiens
gattgctcaagcagcatcagaagcaccctaaaagtccttcaaggctgggaygatacacaagaaacactgacttccaagtttcacatgaggtcccagaaagc

SEQ ID NO: 1191 - DNA, 101 bp, Homo sapiens
ctttactaatagatctagaaaaaaaaataatttcccaaataaattcctgcrtaacaagtaccaatggatgtgtttccaaatgaaaccacatttggaagaac

SEQ ID NO: 1192 - DNA, 101 bp, Homo sapiens
catgtagagttccttggcttgggcaaaagtccactaatccttcatgtctcrgtgcaaatacgaccttctctgtgaatccttccttcacttccccatataga

SEQ ID NO: 1193 - DNA, 101 bp, Homo sapiens
aagaacccacagaagttggaatagttttctccattttagacatagaaaaaraggcccagaagagttaaccagtccaaagtgatacaaccagtgaggagaag

SEQ ID NO: 1194 - DNA, 101 bp, Homo sapiens
ggcaatttcattttcttttttcttcttagttgtgaatttttctgccatgarcatgtatgaccaaaacaaacacacacacacacacacacgtacacacaaac

SEQ ID NO: 1195 - DNA, 101 bp, Homo sapiens
tgagtcccaacatgtgttcatacaacatgaaaagaaagataggactgggtytccattatcatgtgaactgccgtggagaaggtacaaaaggagggcttaaa

SEQ ID NO: 1196 - DNA, 101 bp, Homo sapiens
tgcaaaggtttttggatgaacctgtcttcattgctcttagatgtgtgcttkttgggcaatattgtagctgcatcccaaacttttccaaggtggttatttgt

SEQ ID NO: 1197 - DNA, 101 bp, Homo sapiens
caacaggacaagcataaataaattgtcatatatttaccaaatggaacattrtaaagattgaagaaagataaattggtgttgtaatgatgacatagattaat

SEQ ID NO: 1198 - DNA, 101 bp, Homo sapiens
aaaatcccatactgagaaatagtgcattagctccatttatgcttataaaaktatgtttgaaaccattttcaaaccatttgtataccattttcagcagctcc

SEQ ID NO: 1199 - DNA, 101 bp, Homo sapiens
tgaattgtacagttcatagcacaatggtgtcttggaagcagaatgcgatcyttattttttgacttgaataaattagtcaaatctttcattttcatttcaga

SEQ ID NO: 1200 - DNA, 101 bp, Homo sapiens
ttaaaaatgaaaaaaaaagaaagaaaatagagtccaggacataccattagwtcagtagtaattgaaattcccgtcatttatttgatatctttcaaacccgt

SEQ ID NO: 1201 - DNA, 101 bp, Homo sapiens
cttgctttgtttatgaaaatctccacaaaaacctagcaagcagttagattmtaaaagcagtttgaaaaaatgataccctagaagaaataaatgttttcctc

SEQ ID NO: 1202 - DNA, 101 bp, Homo sapiens
atttttttgaatcaatttttttgatttataagagtttatattctattagcrtagttacggtgaccatttttttccttggtttgccgtgtaatattatgtta

SEQ ID NO: 1203 - DNA, 101 bp, Homo sapiens
gaactcctggccacaacagaacctcctgcctcggcttcccaaagtactccrattatagctgtgagctaccacacccaaccaaaacactaccttcttgatca

SEQ ID NO: 1204 - DNA, 101 bp, Homo sapiens
atctgaatctctagtttgctttccataaatatcgtgctaagttctacttayactagctgtttgcaactgttcatttaaataccacaatcctcaatactaat

SEQ ID NO: 1205 - DNA, 101 bp, Homo sapiens
ttgaagggtttaacatttgatgtaggtcatgcaaagataacaaatactggygaatttagaagaaggcaactttaaaatttttgcttctggccttactagcc

SEQ ID NO: 1206 - DNA, 101 bp, Homo sapiens
ctttctttatcagctcataacaacttgacatctctattcatgcacttaacrtaataattgaggatcattgttatacatatctgccttactcacaatgataa

SEQ ID NO: 1207 - DNA, 101 bp, Homo sapiens
ccttttgctgctagtttaaatcttgaatatgttttcttaacttctgaatcrcttctttctgtgcatgttcaatcatatgaactagattttcattatatacc

SEQ ID NO: 1208 - DNA, 101 bp, Homo sapiens
tggtgccaaagcagaagttggcaatagcaccaacaactctagcacttcttkttcctatcctcttctgtatagtgcttcaagaaataggtcccaccataaga

SEQ ID NO: 1209 - DNA, 101 bp, Homo sapiens
tgatctcagtttttattgtattatttaatgttattacatcaacctctaaayacaagttctaaaacagatgtttctttgaaaactgagatgaatactttgaa

SEQ ID NO: 1210 - DNA, 101 bp, Homo sapiens
ctgtgatcatctacacttccaggtaaactttgggagccttccaaggacttyctacctacactcagtgcaggagggaaaggctgtgaaatttggtaggtcaa

SEQ ID NO: 1211 - DNA, 101 bp, Homo sapiens
aaaaaattgtaagtctgtgggctacttaggctttcagttgcaatctacaaygctaaagggtaaaagtaaaggcaactgtaaatggatccggtcttataaat

SEQ ID NO: 1212 - DNA, 101 bp, Homo sapiens
attgtaacatcaatgaacaacacattaacacagaaacaaataaccttaagrctgaatagaaaggcatagtattttcaattcttataaagtttctgtttcag

SEQ ID NO: 1213 - DNA, 101 bp, Homo sapiens
agtatttttgtctgctagaataatttcaatggtgaatgagccttgcgtatyaggacaaactgacttagtgtttgctttagaaaatggcgattttgatggta

SEQ ID NO: 1214 - DNA, 101 bp, Homo sapiens
tattctaatgaactgggattatggaaatttccacagatctcttcttagtcrcatttaataggaaatatatattacatacatatttatggaaataacaaatt

SEQ ID NO: 1215 - DNA, 101 bp, Homo sapiens
atgagtgtgattaatgttacctagataagggcaaagaagtctttttatagraggtagtatttgaactgggtcttaaaatataaaaggaaattgatcaggga

SEQ ID NO: 1216 - DNA, 101 bp, Homo sapiens
gcatccaggaaagcatttttctttttttttttttcagtaatcagacgctgytatttaggcaaaaataacaattgctgggtgtggactactatgtattgttc

SEQ ID NO: 1217 - DNA, 101 bp, Homo sapiens
ctaggaaaatggaagatgctaggaaataattcacaagcaacacagtcagtragtgtaaaatgtgagaaaaggcatgtagtagggcagaagaggggagagct

SEQ ID NO: 1218 - DNA, 101 bp, Homo sapiens
agtttatcatcaattcgtctctagtaattctatgaattctgggccagtctstccacccagaatgtagtattctaaatgctggatcctgtatttcttctaga

SEQ ID NO: 1219 - DNA, 101 bp, Homo sapiens
cagaatctcatcaagtgtggacggcaatcctaacaggctattgataaagayaatgactgctcaagagagatttagtaacctgccaaaagtcatttagttaa

SEQ ID NO: 1220 - DNA, 101 bp, Homo sapiens
ctaagctcctcttaatttcctgcaatgctgtaaaggtacatatacacataytgaggctaacagactaaagataattacattttatcaattacctcttgtaa

SEQ ID NO: 1221 - DNA, 101 bp, Homo sapiens
ttggcattttaaacaggtatggaagatgaaagtaagatgggttttcaaatsgtatctgctcagccatttggaaaaaagatgttggaggcatgtgtcatttc

SEQ ID NO: 1222 - DNA, 101 bp, Homo sapiens
aatcgatatgttgatagcacatactgtatgtcaggcactgttctaaatatsttaatttttgcttcaaaacaaccctgtgagatactactatgtatgaggaa

SEQ ID NO: 1223 - DNA, 101 bp, Homo sapiens
tactatctccttgctcgattttgtcatcacacttcaccctgtcattaatcycttgttattctcaaatctttgtgataaggaggctgacttgcctcctaatt

SEQ ID NO: 1224 - DNA, 101 bp, Homo sapiens
tctagtcttctctgatgattttataaaaccttaatgcttctgcttgtttayctgcaaaatcaatttgtttcatagaattttaggtaaatttgtaattctta

SEQ ID NO: 1225 - DNA, 101 bp, Homo sapiens
catgctataaaaagcaaccaaatctagttaatatacgctaagttgggtaayaggatcagattctttacagtaaagcttacaaaagtaaaattattttataa

SEQ ID NO: 1226 - DNA, 101 bp, Homo sapiens
gcagctcccagaagtttttgctttcacattaactctgggtaaattattacrgtggcatattgggcaaattttagaagtacaggaaggcctcttagcatgat

SEQ ID NO: 1227 - DNA, 101 bp, Homo sapiens
aaaaatgagaaactaaggaggaaacagggagaaggttaataactcattctraaaatacctgtaagatttagccatgccctaaagttttaatcggttgggcc

SEQ ID NO: 1228 - DNA, 101 bp, Homo sapiens
aaaaaaaaagaaccagagattagacagaaaaaaggaagaaatggtagcackttgtctttcaaaggagctgatggaaaaaatacaggctaatctacttttct

SEQ ID NO: 1229 - DNA, 101 bp, Homo sapiens
agtgttaaaaataatgttgatataggtggacaactagagtatttaggagtytattgaagcagtgtaataagaatcagcagaatatagacataaaatatagc

SEQ ID NO: 1230 - DNA, 101 bp, Homo sapiens
accgagaacccaccaattccagacacaatagtttcacctaatgtcaagtaytggattactttcaaatcatttttattccctgtgaacaaatagatttagag

SEQ ID NO: 1231 - DNA, 101 bp, Homo sapiens
gaaatattgcacagccactaaaaaataatgtgtttgaaagtgatgtaatamtacggacaaatacagatactgtaatgttctttaaaaatttgtttaaaaaa

SEQ ID NO: 1232 - DNA, 101 bp, Homo sapiens
taatagcttgattttcaaccatgtttcaagaacaaataaggtcataaaatygaagtaaattgtatataaatcactaaataagggggagagtttaacttcta

SEQ ID NO: 1233 - DNA, 101 bp, Homo sapiens
attgttatcaactaatatttttaactggcatgtccccaagatacttcattygaccattttaattaagcaatatatttaagtgccacaaggtggagtgggag

SEQ ID NO: 1234 - DNA, 101 bp, Homo sapiens
ttattatttaaagcttaaggtaaatctatagcaaaactaaactactcttartgacaaaaggaaaattacttaaaattccatttcttagactcctgctataa

SEQ ID NO: 1235 - DNA, 101 bp, Homo sapiens
ataattctataaagctaatactgattaaacacagcacaaaaggattaattmacactactgaaaaaaaaacataataggaccctacttgcatatgtaaccac

SEQ ID NO: 1236 - DNA, 101 bp, Homo sapiens
gggattggatttgaaacactacaccactctgaaggcatctttagctaatcrtaggctctatatgggatgtctgtgtgaaaagcaaagtggaataaagtcca

SEQ ID NO: 1237 - DNA, 101 bp, Homo sapiens
cctcagggatttttaaaatgtgtattagacaaaaaccatcttaagaacttytgtgattaacaagaggtagaagtcagaaactgctggaaagaaataggaag

SEQ ID NO: 1238 - DNA, 101 bp, Homo sapiens
gccagatgggcaagaagccagtgtccctttctcttccactgggacctttgrttatttgggtcacaagctcacagagcaccatccacatgcaaatgcccaac

SEQ ID NO: 1239 - DNA, 101 bp, Homo sapiens
ggcctacgatggtgagcaggattgctgggcctattgtgcccagtggacagwctttaagatgctgattccaatgggcattttgaggtttctgagagtgaatg

SEQ ID NO: 1240 - DNA, 101 bp, Homo sapiens
cattgtttccacagtggtaagcaaatccttctggtcagagattgtgaagawccctgtcctggttatggagcaagtctctggttcagctttctatggaaaac

SEQ ID NO: 1241 - DNA, 101 bp, Homo sapiens
taccagaaaggcatacttagaatcagtgtaaatgttaactcttaaatcttytcttaattgcagggctctaataagagctattaattctgccttttgagctg

SEQ ID NO: 1242 - DNA, 101 bp, Homo sapiens
taaaaaatggacagtggatatgcaaaagcagttcgcagaaggcaggactcrtatgtccaatgaacatatgaagagtagctcaggccaggtgctctggctca

SEQ ID NO: 1243 - DNA, 101 bp, Homo sapiens
ccaccactggcccttttcccccttttgatgttggcaatgggggcatagaarctacagtacactttttaggagttggacagggacagaatggaataggttgg

SEQ ID NO: 1244 - DNA, 101 bp, Homo sapiens
aaaacgcaactgcacggtttaacttttatgaaagttcagcatactggggcyatcaatcatatgcctatatctgttagctattaccataatcatgcaataaa

SEQ ID NO: 1245 - DNA, 101 bp, Homo sapiens
tagagttagtttactaactaactaatttgttcactgcacaaatattttcckagaatttgtcataagagaaatctctgaaaaatagcaagtattttttgatg

SEQ ID NO: 1246 - DNA, 101 bp, Homo sapiens
ataaataattgtagatcaatccaagtggtaacatctacagaaaggttgaayaagatttatgcatctcttgcataaaaactctcaagcagttaaaagtaatt

SEQ ID NO: 1247 - DNA, 101 bp, Homo sapiens
caaactgaatatcatagtcctagggatgattttacctttctgaacgcttgyatgattgcttctttgcctgtttgcctaataaaaattgccatgtgaggcag

SEQ ID NO: 1248 - DNA, 89 bp, Homo sapiens
ctaacagaaaccaaccattggcagctaccatagtctacagagaagaaatamagatataacgagaaagaaagaaggaaggaaggaaggag

SEQ ID NO: 1249 - DNA, 101 bp, Homo sapiens
taacagaatttgctgagaaagacaataatgttcgattttcacaaggtctaygacgatcaagaaatttcactctttggacattactactaaaaaccatcaga

SEQ ID NO: 1250 - DNA, 101 bp, Homo sapiens
tagaaaattagatatagattaggtataggtatacaaatagatgacgctaayaaggcaaaatgtttacaatcattgaatctaggctggaagaataaggaatt

SEQ ID NO: 1251 - DNA, 101 bp, Homo sapiens
ctataaatctactccaaaagcttcaaggtctcccaaatatcacatgacccrtagctaaggcaatcctgaaacctggctgcttgggctagcctggggacaca

SEQ ID NO: 1252 - DNA, 101 bp, Homo sapiens
tgcttctgtgggctgagctttggaaaaagctaatcatcaaaaatccggatrtatttcttcaggtggagaaaggggtttgtagcatcagagggctcctctct

SEQ ID NO: 1253 - DNA, 101 bp, Homo sapiens
tacggaccggacccctttcccctggccattgcttaattagctgccttagckcctctcactcccacctgccgcaatatctcaaatctctggtttttttccag

SEQ ID NO: 1254 - DNA, 101 bp, Homo sapiens
tttgccgtgcaagctttatgattttgtctgaggggttttagaaatttggtygagcctactgtcatttcaatttcaaaccatctcacaggctctacagaatt

SEQ ID NO: 1255 - DNA, 101 bp, Homo sapiens
taaacaagtgttgtaccatgtgagaactctggcgtacttcttcttgggttmaagactaggatagggtagcaatgagacagtaaggaagaactccagtgatt

SEQ ID NO: 1256 - DNA, 101 bp, Homo sapiens
cacttgattatcactacgttgctataaagtggaggttctggggctggcatyctgtgattctcatcgtatgtgactggcaaggaataaagaaagacactcag

SEQ ID NO: 1257 - DNA, 101 bp, Homo sapiens
gaaggaaggtaccctgggaccatgggcactgacttttgccgtctttcaacyacagtgctttgggcgacaactgtcggagataaagcacccacgggccctac

SEQ ID NO: 1258 - DNA, 101 bp, Homo sapiens
tgcaatcacaggcttggctacagtgacccattcattgcaggcatggtgagwctctcaatccctctcatttccactagaatctaactgttgggatctatgac

SEQ ID NO: 1259 - DNA, 101 bp, Homo sapiens
gtgctcagtaagtggcagcttctgttgttttctgtgcctggagtcttgggsctttagaaatcaggaacaatgatccaatattatcggcttccgtgagataa

SEQ ID NO: 1260 - DNA, 101 bp, Homo sapiens
gactgttccagagaatagccatggaaggggaaaaggtccagtgtgataagrtattgcaaagaagtgacatttaagcaaaagcctgcagcctatgcagaagt

SEQ ID NO: 1261 - DNA, 101 bp, Homo sapiens
gtttcaccatgccccatcctcagctaggagagtggaaatggaaagtgtatygcccagtgggtgtgaaagtgggctgaagcttggttggtactgaaatctct

SEQ ID NO: 1262 - DNA, 101 bp, Homo sapiens
attcaaaatgtcgttaccttgtctttctcttggaaggagtgtctcattaaktgccctggccaggtaatcttgctctctgacaagctcccatcagccttcgc

SEQ ID NO: 1263 - DNA, 101 bp, Homo sapiens
gagaccagcactaggctgtccctttattcactgcctcttgtattcattgartggctattactgagcacttactgtgtactctgtctagtgccaggtcctgg

SEQ ID NO: 1264 - DNA, 101 bp, Homo sapiens
attactgagcacttactgtgtactctgtctagtgccaggtcctggggatasagaaatggagaagccccatgccttgctttcaaatgtttattatctagaaa

SEQ ID NO: 1265 - DNA, 101 bp, Homo sapiens
tatcagtcttgtctatggctataccaccctgagtgtgcccgatctcgtctraatatcagtcttgttcctaaataaaatattagcaaatagaattcagcagc

SEQ ID NO: 1266 - DNA, 101 bp, Homo sapiens
acataggttttctagtatctttttgttatatagtcctagcttaattatackgttgtcagaaaccatacattttctgtttcaaacttttgacatttgttgaa

SEQ ID NO: 1267 - DNA, 101 bp, Homo sapiens
ggaagctagtgaaccaactcgtccaagtaaaatgatgaattaaaaggtcayaaataagcatctatcttgccttttctattagatgtctaccactgggtgac

SEQ ID NO: 1268 - DNA, 101 bp, Homo sapiens
gagaaacgcctattttagaaggtggccttaagcaaatttttgaagaaagartaggagttggccaggaggagggctcacagagggtgtattgtactcggggg

SEQ ID NO: 1269 - DNA, 101 bp, Homo sapiens
aagttaagaactctctacagagaatacatgatgcagttagtaattttaaayaggcatggttaggtcctgtacagatttgtatctgatcctcttagggggtg

SEQ ID NO: 1270 - DNA, 101 bp, Homo sapiens
taatacagctcctaagcagaatcagctgttttccacatcttttagcaatastacatttgatcaatatccctcctgagccattaataagcatgtgaccttga

SEQ ID NO: 1271 - DNA, 101 bp, Homo sapiens
agagagaataagagaaagaagtgaagaaatgccaggctcttcaatcagctmtcttgtgaactaatagagcaaaactcactcattactgtggggaaggaacc

SEQ ID NO: 1272 - DNA, 101 bp, Homo sapiens
aaaagtgagctgagagtcatataaagatgtaaataattgctgaataagaargttaaaaaattgccaagattgatacaagtattttacatacggtagcatat

SEQ ID NO: 1273 - DNA, 101 bp, Homo sapiens
tagaaattttagttcagtggcctcaaaggagccatcaaagctgtttggcartcctacccagttctctgatctcttgctgtctcaattctctaccatcttcc

SEQ ID NO: 1274 - DNA, 89 bp, Homo sapiens
aggtctcactttgataagatcaaggcacagtccagggcctaccacgttctsacacaaatatgtgctaccatgaaatcactctctcactg

SEQ ID NO: 1275 - DNA, 101 bp, Homo sapiens
gcatatgatttcgggatgagagcatttttccatgaacagaaaatggtatcrccaaaggcaaagatgtaggaatgagcaagctgtattcagagtatagggga

SEQ ID NO: 1276 - DNA, 101 bp, Homo sapiens
ttgaaggaatttattttaaaacaaatttaagatgcatgtgttccatatttratcagtagataacttcaaaggtcatgatgatcctataaatcatttgtggg

SEQ ID NO: 1277 - DNA, 101 bp, Homo sapiens
atatttgatcagtagataacttcaaaggtcatgatgatcctataaatcatytgtgggtttcttaggggaacctagggagtcaaacttactttgtcatttag

SEQ ID NO: 1278 - DNA, 101 bp, Homo sapiens
aaccacctaatgctagagattttgtgaaaaatataactactcgagtccacyattgatgatgggaagagaaattaaaacaatgattccaggtggaaagcaac

SEQ ID NO: 1279 - DNA, 101 bp, Homo sapiens
aatggagtcaatgagaaagagcacgattattcaattgaatgttctaggagragtttttactattggggaaaaagttaaacaggaatcatttgatatctgta

SEQ ID NO: 1280 - DNA, 101 bp, Homo sapiens
ttgcaaacgaagtggatatttttgaaaaatcacattttaaagctaccctcyaaatatgaatgaggtttgaataggaatgagcattgaattttatcacacct

SEQ ID NO: 1281 - DNA, 101 bp, Homo sapiens
acctcaaacaatacctagtgaaataaaactgtacaatgatactcataatastgttttcaaatattaacgaataaatatttatggatccataaaccgagtat

SEQ ID NO: 1282 - DNA, 101 bp, Homo sapiens
ggaaagaaaaaagatgactccatctgtacttcagtggtgaggggtcattgyctatttcgttagtgtgaagggttgttctaaaattcttatgtccaaagtga

SEQ ID NO: 1283 - DNA, 101 bp, Homo sapiens
aacgtatttgttgttaaggatttatggggttatgtgatatcaagggctaasataaaggtaattggctatttaaccaatggttctcagttggcgtaaggtcc

SEQ ID NO: 1284 - DNA, 101 bp, Homo sapiens
gcacctggtacatcacacagacaacagacatgagaggaacaatattagctscagagaaagtcagagccaggaacagtagaaaagtcaaacgggcagcaaga

SEQ ID NO: 1285 - DNA, 101 bp, Homo sapiens
catgcctcccgaattcatgcttcaaacacagccactctgccttcatctgtygtacagattaggcttctctaagagatccgggaagaaaataaaaatggtgc

SEQ ID NO: 1286 - DNA, 101 bp, Homo sapiens
agatctcttagtaaacagaataaaaaatacaaggtcttgaaagtgattcaygcagcctgacccaggaattggtaaaggttgatcctcagaacccagaccag

SEQ ID NO: 1287 - DNA, 101 bp, Homo sapiens
gagctgcagccttctcggaatcgggtacatgctttatccagtgtgctctgrtataagttcacaagcagtgcagcatggggcaaatccaatgacattttgtt

SEQ ID NO: 1288 - DNA, 101 bp, Homo sapiens
atgacttaaacattccctggcaaatagtgagtgcttaataattgcttgccraatgaacaaatataagatctcaagtattcttttttccttcatcccagttg

SEQ ID NO: 1289 - DNA, 101 bp, Homo sapiens
cactgagggacctcagcccacatggcacgtaaactactcgtgcacagctgragataccatttatgctctgtggcgaggcttctcggccttctcctccgtaa

SEQ ID NO: 1290 - DNA, 101 bp, Homo sapiens
ttattcccattgacaaagtcaattacaagggcataaacacgatttatttcytttccaagggtcccagtgcttcaccaacaccaacgccaccactaagggtt

SEQ ID NO: 1291 - DNA, 101 bp, Homo sapiens
aatgagaaggctctttcagccccttaataggaaaagtcatttcttgcttayggtcagcactaacattgattcccaattgctcagcccaaggcctacctata

SEQ ID NO: 1292 - DNA, 101 bp, Homo sapiens
agagcatgccctgccatgaggatggcagcacaacttccaggagtcttagcygtgccttgaaagatgcagtgacttagcgctcaagagtgcaggtaccacag

SEQ ID NO: 1293 - DNA, 101 bp, Homo sapiens
tggaaaacctaatataaacacctgaactgtgcattctttcatgagaggaaracatatttcataactccttatatactaaaaacacaatatattggccaaac

SEQ ID NO: 1294 - DNA, 101 bp, Homo sapiens
cagttcaaattgctaatatatgtgtcctacagcctgcaatataatatttaygtagcttccgaaagagacctgcaaggattccctgtaattcaagatggtag

SEQ ID NO: 1295 - DNA, 101 bp, Homo sapiens
ttaaatggcaccccctggagttgtacgtcgtggcaggccatcatctactcrgattaagaacatagaaaagtacatagactcactgaaccgccagagagcac

SEQ ID NO: 1296 - DNA, 101 bp, Homo sapiens
ggacccattttatgaagatttcttagagtttatattctaatcctacatttrttttgttatattcagtcatgatatttttaattttcaagaactcacttaat

SEQ ID NO: 1297 - DNA, 101 bp, Homo sapiens
cctacaaaattatcaaagaaacttgaactttctaattggaagagtccatckaatgctaagcaggataaatgaaaaagtgtaaagaaatctagaatcccaga

SEQ ID NO: 1298 - DNA, 101 bp, Homo sapiens
ctgctacttaagtctccacgatgggaaaaagcagctcgttattgttaatgycaacacctcagataatatgctttttatctctgctcctaatggtaatgtag

SEQ ID NO: 1299 - DNA, 101 bp, Homo sapiens
agctaaaaaatttggatggggtccaattgggttggagccatgcaaaggtayttggacttcacccttttaagtgacaaagttccatagacacacagtaggtc

SEQ ID NO: 1300 - DNA, 101 bp, Homo sapiens
ggacaaactatcattttcaagcaatgaaatcatcattactatctgagagcyatttacttctagacaaaatcttgtcaactcccaaaattacagactagaga

SEQ ID NO: 1301 - DNA, 101 bp, Homo sapiens
atagatttgggaaacattcgttcaaacagcaggaaataagtttaaaccgtktctgtagcgcaggacttctcagagctttgaagaggctcatgtgcattgta

SEQ ID NO: 1302 - DNA, 101 bp, Homo sapiens
gagtgtaatgtgctctttggttgctattctatttgagcccagttctccagmcttcttcttaattttgtgagctaccccaaagttcctttcctgtgtaagat

SEQ ID NO: 1303 - DNA, 101 bp, Homo sapiens
gtaggaagcagctcgtagggttctagctctagccatgggtatatgcatgcytttggagatgtttctttccttctttgtgtttgtgtcaaatgagagggttg

SEQ ID NO: 1304 - DNA, 101 bp, Homo sapiens
tgaataaacacaccataaatacacaaataaaatgttacaatacagtgtctrgtaaaggtaagtggacaggagatagcaagggatgggggctggtatggtca

SEQ ID NO: 1305 - DNA, 101 bp, Homo sapiens
gaatggtgagtacattgatacaggacagtctgaacaccttagtttgaattmtctaagagtaagctatgtcacagggaatcggtgagaatgtgaacactggg

SEQ ID NO: 1306 - DNA, 101 bp, Homo sapiens
ccccttaggggtgaccctgttttagcttaagtgagagcagatcgcattaaytgcctcgaaaagacccattttaggaataagcagatctcacctcattaaac

SEQ ID NO: 1307 - DNA, 101 bp, Homo sapiens
tgttgcccagaaatgtatgtattttatcctttttcccaaatttcagataayggagtgtttggtatttcattaatacttctgaattttgcctgaaaggtatt

SEQ ID NO: 1308 - DNA, 101 bp, Homo sapiens
ccagagagatgctcttatgtatttagcttctagttttaaataatagatacyacaataaaccttgattaaaccttgattatctgatatgctctgggtttgtg

SEQ ID NO: 1309 - DNA, 101 bp, Homo sapiens
aaaaaaaactacttatggctaggtaccacccctagcttctgactaattgamcttaagtgtgatttaggaatcaaggtcataaaatttctccaggtgattct

SEQ ID NO: 1310 - DNA, 101 bp, Homo sapiens
ttaaaacccactaaaataccacttatttagagttgggatagatccatgacyttctattgttcaaaggcattttcctttgtaataattccatggaaagaaaa

SEQ ID NO: 1311 - DNA, 101 bp, Homo sapiens
agaattacggcaaggatagggaggtctgtgtgtttttgtacattccttctygacccttttgagaccttttcaaacttctcttctccacacaaaactacctt

SEQ ID NO: 1312 - DNA, 101 bp, Homo sapiens
gaagccagattctctgggttagaattctgtaactgctacttactggttatrtaatcatagacaagttaattaagtatcttctttgtaccttggtttcctca

SEQ ID NO: 1313 - DNA, 101 bp, Homo sapiens
ttcctgattgcttttagacatggaagaattgggagaaacaggtagtatgaragtatttgggaaaacgaagtgccttaacaatggatgcatagcatacttcc

SEQ ID NO: 1314 - DNA, 101 bp, Homo sapiens
agactagaggttcaaaattaaaggaaaggccaaatctcaagttccaaggcyacattttgaatgacttacctcaacttctacctttgtgaagagctggcaga

SEQ ID NO: 1315 - DNA, 101 bp, Homo sapiens
gctctcatctttttactcctttaatgctgacctctgccaaattgaatgatrtattttcacatcctgacaaaaggaactgaccatagctgatagagccccac

SEQ ID NO: 1316 - DNA, 101 bp, Homo sapiens
tcctgtcccagatgaggaggagactaagcgacatgtttctcaggttaacakctcatttgtgcttttggtcccagagtcccccacttcctcttggtccttag

SEQ ID NO: 1317 - DNA, 101 bp, Homo sapiens
ttattgataaggcttcagtgactggaggaacaccagcgtccttggttttgrgctgatttagataaaacgacatggatatacatggaatgatttgaaggagc

SEQ ID NO: 1318 - DNA, 101 bp, Homo sapiens
ataacttctagctcagatgatatcataaaaattacctggaggatgattacractgaactgcaggatgattaagaatgaagtagaatgttgttaccagcgtc

SEQ ID NO: 1319 - DNA, 101 bp, Homo sapiens
cacatccagcactagctctctttctgtgaatctactttgcatactactacyagattaatcttctaaaaatgtcacttctttcatatcactttctgacttac

SEQ ID NO: 1320 - DNA, 101 bp, Homo sapiens
agatttctcttactgtcataattttgcaaaggcattttcactaatatgackattcaactgctgggtatagagaagactgatatgtaattgaactaaatcat

SEQ ID NO: 1321 - DNA, 101 bp, Homo sapiens
aattgcctggacctcttttaggatacatcaccagtcttccaatggcaaacktatgtttattccagctgattctccccagcatgggggcatgaattgcagtg

SEQ ID NO: 1322 - DNA, 101 bp, Homo sapiens
gggggtttaatattctcccttgaacagtattttatcgcctgaggagaatgrttttgggtgcagaactacaaagctagtctcagggtggactgtgggctgtc

SEQ ID NO: 1323 - DNA, 101 bp, Homo sapiens
ctaaacccattcattaatccaaagggtcctatttgcttatgagtttcatcraaggcatgtttcaaacccatgaagcagcaaaaatgacaagttaggaagtc

SEQ ID NO: 1324 - DNA, 101 bp, Homo sapiens
gtcccaaattctacatccaacgcctttaggtcacctatatgcttttctgawgactgaaagaaagggaatgacaaacttttaaaaaacgattaaaaagatct

SEQ ID NO: 1325 - DNA, 101 bp, Homo sapiens
caatgtgaaagttttccaggtcaaagctggatctctctcatccatcactgmgttctccaaggtgacatgcaattcaggagaaaagcatcagcatccagaaa

SEQ ID NO: 1326 - DNA, 101 bp, Homo sapiens
atccacaaactataaggaaaaaaaaatcaattcagttgacattaaagttgraagtgtactcctcttatccaacaacaacaacaaaaaaacccaaccccaaa

SEQ ID NO: 1327 - DNA, 101 bp, Homo sapiens
ggttacctttaaaagtaaagagaaatcatcaaagaaaacagcaacacaaaygagacacaatacctaccactcatgggccactatgtaggaattttaacagt

SEQ ID NO: 1328 - DNA, 101 bp, Homo sapiens
ttccaatacttgtactatttatttttcttgtcttactgcattggatagaaygtcaaagtaatggtatatataataatggtaatgtactcttgtattactac

SEQ ID NO: 1329 - DNA, 101 bp, Homo sapiens
ccttttgagtctggcatctttccctcagcttaatgcttttgagtcattcaygatgtgtgcgtgtggtttgttccttctccttgccgggaagtatttcattg

SEQ ID NO: 1330 - DNA, 101 bp, Homo sapiens
tgcctgacaaagaccgaaattgctcaataagaacatgtgttattgaattaytgaggtaggtaggaggtggtggagattaaacatctcacctctttctccac

SEQ ID NO: 1331 - DNA, 101 bp, Homo sapiens
gtgtccacccaagggagatactgtaccaataccaaaggcccacatacatgsctctagcgctaagtcatttttaaagttagtctgatatgaggatataacat

SEQ ID NO: 1332 - DNA, 101 bp, Homo sapiens
aagcgaagtgatataccaaaaattggaaatgaaatgcatgcccaaatcacrgtatgcgatagtgcacatgacctcaggtctgtatggggaggctgaacagt

SEQ ID NO: 1333 - DNA, 101 bp, Homo sapiens
aagacaggcagagggcagggccccatgtaccaggcagcctggccaagaacmagggcagaagcacaaagagcgtgaaaaactgagaagccaacttagatggg

SEQ ID NO: 1334 - DNA, 101 bp, Homo sapiens
ctccgttaaagagaagacagtatttgtactcaggatttgaacaaggcccayttattgaatatagttgcagcactggaatctgcaagacaaaagagaaagag

SEQ ID NO: 1335 - DNA, 101 bp, Homo sapiens
tgagggctagttaggttctctaaatttccagagctgtttaaccctgttaayaagcgtgaaagaaaaatggattctagcttaggcctgctttatacattaaa

SEQ ID NO: 1336 - DNA, 101 bp, Homo sapiens
ccctctaggtcacctggacagccacatcaaaaccccaaagtgtaaggaccratgacacagagttgaagcctgacatacaaattagtagcagaaaccatctg

SEQ ID NO: 1337 - DNA, 101 bp, Homo sapiens
tggactggtggggaagcaattagtgcttactttctgttttgattcttgtakctaataggcagagtttgtgatgtcacggaaaagcagccttgggcccgcgt

SEQ ID NO: 1338 - DNA, 101 bp, Homo sapiens
cctcacagtggtcaggctgcatcagcataatggaaaaaacaatatttctcyttgatttaactttggagagagtctgacagaaggagtgagtgctctcaaat

SEQ ID NO: 1339 - DNA, 101 bp, Homo sapiens
atgatcgcctccaacagatcagagagggttggttatggtcgtatctttaaragtgaaattttcaactcctaagacaatgagaggtctgaccatgagtcctt

SEQ ID NO: 1340 - DNA, 101 bp, Homo sapiens
cacatacacacacacatacacatagcgttattgaactacgatacaaccaartggacccagcagtatattcatcctctgcagtggaattctactatggcagc

SEQ ID NO: 1341 - DNA, 101 bp, Homo sapiens
aagatacatcatttaccttaagtcagttatagcaaaggctcaattccagawaattttgaatccaaaaccagtgtttttttcactatagcaaggagttccat

SEQ ID NO: 1342 - DNA, 101 bp, Homo sapiens
ttccacttatcatgtacaagatactattcaaggaatcttggagattctttytgaaattctgactactatacctcaccaccttgaataatacctggcacctt

SEQ ID NO: 1343 - DNA, 101 bp, Homo sapiens
gacaaatttaaccaacagataccctttagttccctctctcaatggagcttyttaattgtacagatgagagaaaccaatgaacctgtttttgtgatttaaag

SEQ ID NO: 1344 - DNA, 94 bp, Homo sapiens
tggtacctttcctccataggggcagagattgaacccgttcaggrtgaaaagagccatgaattaggctgggattttttttctctttttttgatat

SEQ ID NO: 1345 - DNA, 101 bp, Homo sapiens
tattagaatgtttgttttttattaatgagtggtagacttttgtattcttcrtaatcttctcaacttatttttctgcagtttataaatttatattggtactg

SEQ ID NO: 1346 - DNA, 101 bp, Homo sapiens
aacacagttttagaaactggagagtatatgaataattgaaaactgaactcsaacagtagcagaggaaatcaacaaaacaacctcgagaggtctcaaaaagc

SEQ ID NO: 1347 - DNA, 101 bp, Homo sapiens
agtcataactgcagtatgtccccagcctcaggcttaggtaagcagtacctyatatatcagcagtaccttttacattataacctttcagtaataagctttaa

SEQ ID NO: 1348 - DNA, 101 bp, Homo sapiens
cacaactagaaaacatcctttatttatattaaactagaaatgtattacgaygaatgcattaatatcttgcactactaaatagagaaaaaaatagaaattat

SEQ ID NO: 1349 - DNA, 101 bp, Homo sapiens
agaatgtctgaataagagataacttgtaataataggcatattgctcatagyatgttaatctcaataatcttaacaaagcatgttgtaaacactaagtaagg

SEQ ID NO: 1350 - DNA, 101 bp, Homo sapiens
agtgtctttgctatcttgtatcagtatagctgagtaacaatgtcctctcayggaatttttacacatttctgatgctctatgtaattcatgaagtcatgtga

SEQ ID NO: 1351 - DNA, 101 bp, Homo sapiens
tggtgaattatttttaaaaatatttttctaagcttttaacttacatatgasataaatggaagaaatatatatagtgaaaatttttaaaatcgtgtatttta

SEQ ID NO: 1352 - DNA, 101 bp, Homo sapiens
ggtatatcactctgctattggtacaataatgctgtgtaacaaactatacgraaatataacagctcaacataatcatttatttgtacccactcatctcaggt

SEQ ID NO: 1353 - DNA, 101 bp, Homo sapiens
acttgctcatgagatggctctatcaataaagagatccggtttcttaagcaragtctcccagatcatacgcccaccttcatgtgaggacgtgtgctgccaat

SEQ ID NO: 1354 - DNA, 101 bp, Homo sapiens
agtacatgacattctagactggactctcctttactccttttcaatgggctyatgggccagtgtttattttgctgactgcctcaaaggaagtagtgtcctcc

SEQ ID NO: 1355 - DNA, 101 bp, Homo sapiens
atagctacaaaaggcaaagtcactaagacctaaattatcatcacatcaccrtattggaagagttggttcattgatacatcagtgacaggaattgaactcca

SEQ ID NO: 1356 - DNA, 101 bp, Homo sapiens
ttgaaaaagaaatctgggtcagaaactgaaaagattaccttccactaaagycttgatttcaaactacttcattagaaaaatctgtaatagtacaatatttg

SEQ ID NO: 1357 - DNA, 101 bp, Homo sapiens
tctatttgttaggtgttcagtctgtgccaagaatgatgttgagctttacartgtattattttaattaattgaacattctaaaagttgatcctatacacttt

SEQ ID NO: 1358 - DNA, 101 bp, Homo sapiens
tcaatatatgatgattaaatgccttggcatttttaagtatttcactaaacrtgggagattaagaaaagcaggcaccataaatctcctcctccctggcctac

SEQ ID NO: 1359 - DNA, 101 bp, Homo sapiens
tagggcttcaattgtcggggatggatttgctgagaggtaagattggacctsagttttgaagaaggaggatataacttgtacaggaagacacgtgaggaaga

SEQ ID NO: 1360 - DNA, 101 bp, Homo sapiens
atgtaagactaataggtttacattaaatttaataatgcaaggtctttatawacttggttacagaaaaactgacttaaattttgtaagaaagctatcaataa

SEQ ID NO: 1361 - DNA, 101 bp, Homo sapiens
aatgcatcaaaaatcttactgttgggaattttatgatattaagatggtaaytgaccagaagactcagagcttgttattaaactaacacacctacccacaat

SEQ ID NO: 1362 - DNA, 101 bp, Homo sapiens
ggattgttgcccagctgttattaggtgttacaccaaatgccactgaaggcrcgagttagggaagccacccatcaaaatcttcaagggttagacagctctct

SEQ ID NO: 1363 - DNA, 101 bp, Homo sapiens
tatcatatataaataactgaaaacagaatgcttttatggctaatttgacaratctgtttgatgttaatctctgtacatttggcatggtagaaattatgacc

SEQ ID NO: 1364 - DNA, 101 bp, Homo sapiens
ggtcctttgtttctttaggaatttgcagtggtgatcatctatttttatccwtcttccttcatttgttaattggaatactactctagagatgaacatttcct

SEQ ID NO: 1365 - DNA, 76 bp, Homo sapiens
gagcaccagccacagagcacctgtcaggagtggggatcccctgaagatttktgatcaaaggatgttatgtgtgtca

SEQ ID NO: 1366 - DNA, 101 bp, Homo sapiens
tgtcaataatgaataaatccatatatattatattaagtttgagcaatcatraacaaattcataaggaataatgcgctacaggcagggccgaatcaaagagc

SEQ ID NO: 1367 - DNA, 101 bp, Homo sapiens
tgacctcttcctggtaaagctatgacctctatagagacagttctgggagayaaaacacattcagggagaaacccagtgtcagggataccatgcgtccagtg

SEQ ID NO: 1368 - DNA, 101 bp, Homo sapiens
agagccagaagagagtggtagaaaccaagggaaaaatgtcaagaatcaaaraatgatcaaccctgtcataccacagttgaagactgaagagagcccaagtg

SEQ ID NO: 1369 - DNA, 101 bp, Homo sapiens
ccccggagatgataaaaagcccctcattttcttaatcttctacttcagtgsttcaatttagtgacaaagctataaatgaagcaaatcagtattgttctttc

SEQ ID NO: 1370 - DNA, 101 bp, Homo sapiens
tatttgtgggtgttctgtcattcagcatcgcagtcctgaacaaagtagatrttggattggatcagtctctttcgatgccagatgtaagatgacttcctttt

SEQ ID NO: 1371 - DNA, 101 bp, Homo sapiens
aactcagatctgccattggttaatttagaaaatgaagtttaagtgcttgcygcaagtgtctagcttcccacaatgcaaggacagtctgctcacacccatga

SEQ ID NO: 1372 - DNA, 101 bp, Homo sapiens
gactgggagagataagactcagaaatgaccatgaggatatccaatttttcrtaattgcgaaacttgcactttcaaggacatctaacatagatcaagatgga

SEQ ID NO: 1373 - DNA, 101 bp, Homo sapiens
tgatcagttaacaaagaaagagaaaacttaggcctgttttagaccaggtaytgcaagatatggaggcatcacctgaaagtggacagctgcagcacatttgt

SEQ ID NO: 1374 - DNA, 101 bp, Homo sapiens
ctatgatcccacttctctttcacttaatactcctctttaccgctatatgaygggcccatgtgttgattatctattgctatgtaacaaattactccaacact

SEQ ID NO: 1375 - DNA, 101 bp, Homo sapiens
aaaaccaaaaactgtttaaaaatgaagtcaaacaaaactacaacaggtcartatctatgtgttaaagagtgattgtagggatagtgcttgtctttttacct

SEQ ID NO: 1376 - DNA, 101 bp, Homo sapiens
ggagaaagaagagaagggggggagaagcagtcaaaacaggattataaaaasagtggaatattttatgtttagaggaaataccccaaccccatccttgatgc

SEQ ID NO: 1377 - DNA, 101 bp, Homo sapiens
gtttaaccaccaaactccctcatcagaaatcccttgccaggtacacatgartcagaattagtgtttaattagaattaagtcccctcgggctgccataacaa

SEQ ID NO: 1378 - DNA, 101 bp, Homo sapiens
tcacctttatccttatcacaggatctgggtgtctgagaaagatgaagagaraggcatcgtttattctgagaatgtgttttcttgagtccttgatttgcggt

SEQ ID NO: 1379 - DNA, 101 bp, Homo sapiens
aagagaactttttggggcgataaattttgctgctgtagacatttacgtagwcgtttttgtgtgaacatgtttttgtcttgggtacacccccagggaaagga

SEQ ID NO: 1380 - DNA, 101 bp, Homo sapiens
cacccagcacatgaagaaagctcatagcatcttcctcagaggccttcatgyatcgctcctaacatctacctcccacccaccgtctcacaatggtgtcacat

SEQ ID NO: 1381 - DNA, 101 bp, Homo sapiens
tttgtaaaatgtatgagtgcactctttccttagtaattacagtatagtgarcataattgcatttttgatgattaagaattttacagtgcctgagggttgcc

SEQ ID NO: 1382 - DNA, 101 bp, Homo sapiens
gaaacaagaacacagttgtaaaggctctaagtcagcggatgttccagaaayggtcaataatatttttgctggaaggtaagggaacgtatgaggagctgtgg

SEQ ID NO: 1383 - DNA, 101 bp, Homo sapiens
agtggcagccaggggtaaccaagctatctatctatccagagttgtgaattsgtgaaaacattctctgttcttcaaattcaatatcactgtttcttctaaat

SEQ ID NO: 1384 - DNA, 101 bp, Homo sapiens
gaagctccatgagaaaacggcgtgtgcatgtatgtgtatagttctgagatrtcaatgcaattaatgttgcccctctagacggtctcacttccctttttctg

SEQ ID NO: 1385 - DNA, 101 bp, Homo sapiens
aaggaaatattcactaacagaaacacaggtttgtgatttgtgttttattaraagattgagttagtgtcatgatactgtgttaaatgaagaataaccttggt

SEQ ID NO: 1386 - DNA, 101 bp, Homo sapiens
tatctgacactaatatcaaatagactcagaacgagaacatgatagtctccyatgtcgtgaaagggtttataaacaatgtaagaattttattttaaggattt

SEQ ID NO: 1387 - DNA, 101 bp, Homo sapiens
atcatctttctataggtaactgccaagtttgtaattctggacccagttttytctttgagctgcagaaatgattctaactgcttctgggttgtctccatcca

SEQ ID NO: 1388 - DNA, 101 bp, Homo sapiens
gtctagcttattgacaaaatgtgctaagtcaacgtaaagagactgcttacrgattctataaagaggtatttcttatacctcaaaaaagtgttacctgaagc

SEQ ID NO: 1389 - DNA, 101 bp, Homo sapiens
aacagacaaaccaatacttataattgacaaatctttggcttttctctaatyggtgatattgaaattatataagctaataaacctaatgagtttttaatatt

SEQ ID NO: 1390 - DNA, 101 bp, Homo sapiens
tgacgaagaaagattttgtatgtatttcaaattgttatgcacctgtcattmttttagctattaacatccaatttccatcaggtatgggtctcaaagatttc

SEQ ID NO: 1391 - DNA, 101 bp, Homo sapiens
tgcaatttctgtttttctctcaatattttgaacacatcactagatcttatrcttggttgttaccttacttactagttacaagtttttaatcgatacttatt

SEQ ID NO: 1392 - DNA, 101 bp, Homo sapiens
agcagccccttaaaactggtgtgacaaaggcaaggggcacaaaaaggtgtrgttcataaagcatggtttagaggaacctcaaatcagaaatgataagcaat

SEQ ID NO: 1393 - DNA, 101 bp, Homo sapiens
ttctgggatcatttaggtaggaaaaaatagccccatgcctcagtacttctyaaaccatgtcattgttctaaagcctagggtaacggttgatgtttatagtg

SEQ ID NO: 1394 - DNA, 101 bp, Homo sapiens
atcctctatgtgtgactctaggtcttacaaaatcaaggtgtcctttctcaytgagacttccttattaataaaatatttcttctattaaattcaacctggca

SEQ ID NO: 1395 - DNA, 101 bp, Homo sapiens
acagtaattttgaaagctgcattttgttttgttagatttccttttacaaayttacagaaactgaataagtatttataaaaatattaattcccgggactctc

SEQ ID NO: 1396 - DNA, 101 bp, Homo sapiens
ctcgtaagaaagaagcaaggagactggaaaatatagatatacttttctccrtcacatacttaacgataatttgttgggttttgaatagctagaagagagtt

SEQ ID NO: 1397 - DNA, 101 bp, Homo sapiens
cacctttccccctcgcccaagaattccgccagcgactgagtcacatttccyatgagggccatgctgtagctattcatcatcctaaaagcctgggtcctgtg

SEQ ID NO: 1398 - DNA, 101 bp, Homo sapiens
attgataactagttggcttttggagggatataagaagtgtgaatttacatmctgttggtgtccatgatatcaaaaatgccatctaagaaaagtcatagaaa

SEQ ID NO: 1399 - DNA, 101 bp, Homo sapiens
cagtgcttgaggaaccaggcccaacacaccctccctgtgcctcagcctaastgtcttcatgccgtggatgaaccatgccagtggatttcccttccggggag

SEQ ID NO: 1400 - DNA, 101 bp, Homo sapiens
atgaccacgttcctcctgccaaaaactgttcactcactttaagagatgatkgtcaagcatagacctctgaggtgcgctcagaggaattaacaaatgttttt

SEQ ID NO: 1401 - DNA, 101 bp, Homo sapiens
cttatataatgagatgttaaaattctgttaaacttccttcaactttgtctrtataaatgaacctaaacttctatactttggaacactgactttgatccttt

SEQ ID NO: 1402 - DNA, 101 bp, Homo sapiens
tgcaacataggaattataataatacttacctctttggtttattgtgaataytacataagtgagtacgagaaaatcacttagaacttttcctgtcacatagt

SEQ ID NO: 1403 - DNA, 101 bp, Homo sapiens
tgtcatctggagagacagaagacaacacacagtggcagatgatgtcatcascgcgttggtaagatgggttcagatactgaccagcctcctgtggctgcgag

SEQ ID NO: 1404 - DNA, 101 bp, Homo sapiens
catattcagtacagacacaaccaccatacggctacctacctagtacacatyatctacaatataacattttctttttaaaaaacagttatggattggtttca

SEQ ID NO: 1405 - DNA, 101 bp, Homo sapiens
ggagcaagatacctgtggcttctcttcccctgaggtagaccagagaagatrttgaagccatggaggggcaacaaacatcttggaaaaggcacagccttaag

SEQ ID NO: 1406 - DNA, 101 bp, Homo sapiens
ttacttatgcattataattttaaataacttgcaattctgtatgtacacgtkaagtcaatgtgaggtttaattaagatacaaatcagccatatgtctataac

SEQ ID NO: 1407 - DNA, 101 bp, Homo sapiens
ttttaaatccactgtatcttattattttaataagcaattggaaaaacaacwtgaattgaagatctaaaatgtttctcccttactataatgcatggaatctt

SEQ ID NO: 1408 - DNA, 101 bp, Homo sapiens
cttataggtctgatgaagcaaaaactaaccatgtgcttttgtatacacackaagaatgaaggcataacaagtgatctaagagttgaattgcagccgggcat

SEQ ID NO: 1409 - DNA, 101 bp, Homo sapiens
gtttatgttataaaattgacagggcagtggcaaaaatagatgaaagttacrtaaactatgggatttaagtttctcttaggtaagcttaggaaaaacagaac

SEQ ID NO: 1410 - DNA, 101 bp, Homo sapiens
gacatgtggacatgagaatctccactttccccttcctcctcttggtaaacygctcacaaatgttcaggtaacatctgctactgctactccacctattcagg

SEQ ID NO: 1411 - DNA, 101 bp, Homo sapiens
ccaaatgtgcgaatgctgaaaatgtttatttaaagcttccaccaattgagrtaattcttttttttgaacatgggacaaaaaaataaattattgtattgcat

SEQ ID NO: 1412 - DNA, 80 bp, Homo sapiens
gaatgtggcaaaggttttagtatgttctcaatccttactaaacatgaggtmattcatactggagagaaaccctacaaatg

SEQ ID NO: 1413 - DNA, 101 bp, Homo sapiens
cttttctagagtttagttttctcaactagaaaacttgggaggtagacaagwtcagtattccttacactcttttttaaaatggtcatagcttcttcgatggg

SEQ ID NO: 1414 - DNA, 101 bp, Homo sapiens
ttttcctgctccaccagctccttctcattctcagtaagaacctcattgtcytggagatcatcgagcacccctttcaggtcccccatcctggcttggagttg

SEQ ID NO: 1415 - DNA, 74 bp, Homo sapiens
tatcaaaaaaaaaaaaagcatgaytgtgacacctggaaaaaatcttttttaaataaaaaagtaaacaatgtaaa

SEQ ID NO: 1416 - DNA, 101 bp, Homo sapiens
aaagaaagagcgagcgaccagggcaagaatatgtgacggactgtgcttgayggtgaggtattgttcctcacaggagggcattagctgccaggggccgccca

SEQ ID NO: 1417 - DNA, 101 bp, Homo sapiens
ccattaacaatagcaaagtcatgaaccaacctatgtgtccatcagtggtckattgaataaagaatatgtggtacatatataccatacaatagcacacggcc

SEQ ID NO: 1418 - DNA, 101 bp, Homo sapiens
ctgtcttggagacagattggagccctttgtgggaaatgagctcatttgtgyggattgaatactttctttccagagagacctaatgacacctatttagacac

SEQ ID NO: 1419 - DNA, 101 bp, Homo sapiens
cttatggttggggtagggggtaggggaggaatgctttgggatatggtagaygaagataagaggcatgaaggacagggaggaaacaaatcaaccctggaaat

SEQ ID NO: 1420 - DNA, 101 bp, Homo sapiens
agccctacactaaccatagccctacactaaccatagccctattaattttcrcaaaataagcaacaaacctcttcatatatctggctcattaatttctgatg

SEQ ID NO: 1421 - DNA, 101 bp, Homo sapiens
ccaaaaaatgaaaagagccagttacctatgagacaatatcaagcagtctamcatacctaaaattggagcctgtattagtttcctactgctgctgtaagaga

SEQ ID NO: 1422 - DNA, 101 bp, Homo sapiens
ttgtacatactccatgttaaaaatatctgattgcatattttgcctgatcartatgaaaactacgcaaactttagtgttggttggcaaaatacttgtgcttt

SEQ ID NO: 1423 - DNA, 101 bp, Homo sapiens
tttcttgtccttatgaaagaataaaccttcataatttttgtcactctcaaygagattcttagaatgctgaggagctgccactggagctgaaataatttgag

SEQ ID NO: 1424 - DNA, 101 bp, Homo sapiens
tattatcttccctctttagaaaatcatcttctgatgcccaatactattaaygatgtttcttataaactatagtcaagatgtctattcttaagtaatctttt

SEQ ID NO: 1425 - DNA, 101 bp, Homo sapiens
tggatctaggagacggagagttttatgaaactttttaaaagtgaaaatgayagtatgacacaaattcactttctgccacctcttgggtagtccatctatct

SEQ ID NO: 1426 - DNA, 101 bp, Homo sapiens
ttacccctatctgtattgcaacagaaaatttgggcctaaatcataaatacwtggagtcctcaggtgttcggtgcttggggctatggctgtgaagtggttct

SEQ ID NO: 1427 - DNA, 101 bp, Homo sapiens
tgtcaatggtaaaccacctaattctgtacattaacatgcaggacaattgayatgttaagaatatttaatacattaaagtatttaaatctcctagttttttt

SEQ ID NO: 1428 - DNA, 101 bp, Homo sapiens
caggcatgtgagcctgcagctgcattttcagaagacatgtgctgcatgctygggaaggtgttagctctccatcagttttcagggtaacctcagccctgggg

SEQ ID NO: 1429 - DNA, 101 bp, Homo sapiens
ctagaatgttatctgcttctggggagaaccacactgtgcagtttcaccttrgaatcatcaatggatgcgcagctacaagagtttgaaggggacctgtggac

SEQ ID NO: 1430 - DNA, 101 bp, Homo sapiens
cgagggacaaagggaagtgagcccacagcaggctgtaccaggctgccctgyttgtgccttagtgggaagcccagtgaggcattaagcccaggggttcactt

SEQ ID NO: 1431 - DNA, 101 bp, Homo sapiens
cttttgatgtttgatgtttaacttttgagatttgggaatttgttattgagstgtaatctagcctaacctgacagatacagtgctcaatatatgttttaggg

SEQ ID NO: 1432 - DNA, 101 bp, Homo sapiens
cacacaaatctacacacctatgttttgggtacaaacgtaaagggctgataraccatatgactctcatccactgtgctcaagttgaggacatctgctctagc

SEQ ID NO: 1433 - DNA, 101 bp, Homo sapiens
tcatgctcagaagtgttatgatttggacaagaaattatgtagtcactctaygcatatggacaggtcctatcaccaatggagaaagcccataaggaatttta

SEQ ID NO: 1434 - DNA, 101 bp, Homo sapiens
ttttacccacttcccatttgaagaggggattgaatagtcaggttactttcytttatagtgtgtagcatgctcttgaggtattgctcaatgtcttcagtcca

SEQ ID NO: 1435 - DNA, 101 bp, Homo sapiens
tgcatgataatacttcccataaattatagtaatgttaattgtctccctcaragcaaggccattaagccgcttactgcttctaccttaataatttattttga

SEQ ID NO: 1436 - DNA, 101 bp, Homo sapiens
tgacagtcctttgttgtatatttcatctctaagtataacaggagagggaarcaaatgaccaaataggtcgtgataagctctgcagccaaccaagacaaaag

SEQ ID NO: 1437 - DNA, 101 bp, Homo sapiens
aaggatgagcaaactagaactacagtctcaatatggttgtactgtataaamatggaatcaaatgaaagaagccagacacaaagaagcacgtactatacaat

SEQ ID NO: 1438 - DNA, 101 bp, Homo sapiens
ttggggtaatttattacatagcagcatataattaagacactagacattttrtttcttcgggatttttgtttttgtttttctttattttttatgttgttcca

SEQ ID NO: 1439 - DNA, 101 bp, Homo sapiens
caagtgcaaaaatatttcaaattttttttaaattaaagacttagaaaaatsaatgagagttatctagacagtattcagtagatcacatatcaggctacttt

SEQ ID NO: 1440 - DNA, 101 bp, Homo sapiens
tagtaagaggtcttacatgtgctagctaagcatttgttgactgaacgaatrtattttatccatgtttatcttgaagtttagaatatataattccattaggg

SEQ ID NO: 1441 - DNA, 101 bp, Homo sapiens
tctaattaaatctcaacacagctataacaaagaattgaagatcttttgtcsttttactggagaaatgcgtttaaaatttcttgggagggaaatacataaaa

SEQ ID NO: 1442 - DNA, 101 bp, Homo sapiens
tttttccactgcaaggaatgccatattcagagactacataacaaaatcaaracgttgaaatttagcggctgtccttgctgacacaaacacacacacacgca

SEQ ID NO: 1443 - DNA, 101 bp, Homo sapiens
ctttaccaaatacaaatgaatttcataagggaagattatatgtgtttttaygtctaccattataaatttgtatgccaaataagatcacatggtttctttcc

SEQ ID NO: 1444 - DNA, 101 bp, Homo sapiens
ctgttagcaaattttaaccacttaggaaacactttttcacattgtcctaaytgattctatttagaaattaaattctaatggtttggtcactattattgttt

SEQ ID NO: 1445 - DNA, 101 bp, Homo sapiens
ataggatcttgcagtgtgttctcttttgtgcctggtttccttcattcagcrtactaggttttgaaatttatccatgttgttgagtgtgtcgatagttcatt

SEQ ID NO: 1446 - DNA, 101 bp, Homo sapiens
ggctatcctcacactgctgtctgataaatattcctacaatgcaaaccaggmtcaattataggactgtgcataattatgcatagtacaatcctcctgccctt

SEQ ID NO: 1447 - DNA, 101 bp, Homo sapiens
atattcatgagacttggcaacagctcttgcacttcatgaatatgttttcckgttgatagaggcaggaggcatggaaattcttggcagacaggggagggtcc

SEQ ID NO: 1448 - DNA, 101 bp, Homo sapiens
agaattctcatttctaaccgaagttcacattatttcactctgtcagtgttktgaaaggaaatacctgttacagattggaaaggtgctgaaaaataggaaag

SEQ ID NO: 1449 - DNA, 101 bp, Homo sapiens
cagagaacacagtgtatcgtacaaaatgtcactacattctaactggaaacsatgtgatcccgacatttgctgctgtcccatcgtctctttgctagtgccat

SEQ ID NO: 1450 - DNA, 101 bp, Homo sapiens
tttcacatgcttttctgaatgggatgtaatcgttttttggatagctaagckgaaattgtaattcaaaattaatcttttctggttttcacaccccttatatt

SEQ ID NO: 1451 - DNA, 101 bp, Homo sapiens
cctagatctccaaattctgaaatacaaaaatgctgccctttctcatctcartattcagaaggtggcaaaaagcactctccttttcaatcttcaactcccta

SEQ ID NO: 1452 - DNA, 101 bp, Homo sapiens
ttgcctcaaaggccacacaaggcgtgttcctcacagcctgcactttgttgkttaggaggtcattcttctgagtaacgaagggaaagattttagttcccacc

SEQ ID NO: 1453 - DNA, 101 bp, Homo sapiens
ccacctgtcctgcctccagaatacattccaccttcttttaggtaaggaacrtgggctctgatcaggaattgtatgcggagtatatgaattccaaacttggc

SEQ ID NO: 1454 - DNA, 101 bp, Homo sapiens
ggaaatacaggcatgttttcacacattccatcaggcacaaatgtgctcttygtgtccaagagattatcttctaaacttggcctttccagtggcacatgtca

SEQ ID NO: 1455 - DNA, 101 bp, Homo sapiens
catattcctgaaaggggcagagaagcctagtgtaggcaaaggaagtctacrgataatccacaaaccggctttaagaaatcatctcaacttccttcttggtt

SEQ ID NO: 1456 - DNA, 101 bp, Homo sapiens
gtttccctttgggccatcagcattccaactgctcctcctacttctggcctytggagaactaaattaccaccatgcacttcccattccacctgtgcctcagc

SEQ ID NO: 1457 - DNA, 101 bp, Homo sapiens
attatttcacacaccctccaagctatccaaaaggacctatccaatatttcrctgcttcctgcttttgttcatgctgcctttgtcaccagtctttgtgtgta

SEQ ID NO: 1458 - DNA, 101 bp, Homo sapiens
tacgccaaccctgacattctgttcttcagacattattatgactaacttgawatatgtgatataaatggaggcttttaaccatcatacacaactcaaggtcc

SEQ ID NO: 1459 - DNA, 101 bp, Homo sapiens
aatgtttatccgctacttgctttccctgcttttgtctttagctttaggtcrtcgtcatgtgttgttcttcctgatacagggaaacaataacaaagataaag

SEQ ID NO: 1460 - DNA, 101 bp, Homo sapiens
tgggtcctgttttccaggactgactcaagcacaactccagtttctaatcasaatgtagcactcagttctacacgagaactaagcatcacaatgagaacaga

SEQ ID NO: 1461 - DNA, 101 bp, Homo sapiens
atttcaggtctacacgttgtgaagttgagtagatgaacctgttgctttagmtcagctgtatccaatcttttggcttccctgggccacactggaagaagaat

SEQ ID NO: 1462 - DNA, 101 bp, Homo sapiens
attgcagttacttacaggagaccagagtaagtttaagcaaaacattcttcrgtatttacccacctggcttcaggtacacacatgcacatgcaagagacagg

SEQ ID NO: 1463 - DNA, 101 bp, Homo sapiens
gaaacaaatccatacacctacagtgaactcgtttttgacattaataatcartaatccatacatgatgctgggaaaattgaacatccatatgcagaagaatg

SEQ ID NO: 1464 - DNA, 101 bp, Homo sapiens
ggtactataaactagaattttagaagatagaaggaaaatattctggagatmattgaagagaaatggagtccaacactagttaaagatgatgaagacagatt

SEQ ID NO: 1465 - DNA, 101 bp, Homo sapiens
ttaccaagaatacctccacgcctttgaataaatggaaatagcctgtaccartccttttaaataacatagatatttctctccctgggaactagtatagaata

SEQ ID NO: 1466 - DNA, 101 bp, Homo sapiens
gcctaccaaagtgctgggattacaggcgtaagccaccctgcccagcggtcrtttatcttttttctagtggtggtcagggcaaaggaatgccttcctgcttc

SEQ ID NO: 1467 - DNA, 101 bp, Homo sapiens
tcatgcttcagtggggtcagcctggggattaaattaaatgagatattgacrtaaaacctatggcaaataggtacccaataaaaggtagctggtgttatagg

SEQ ID NO: 1468 - DNA, 101 bp, Homo sapiens
gataagtagtttagcctccctgagtctccatttcctcacctgtaaaatggractaagaatacctcccccataggattgtggtggtgatgaggtgaaacgat

SEQ ID NO: 1469 - DNA, 101 bp, Homo sapiens
agagctaagtgtgaaaggaaagatggaactctgtcctccccatctaatccrggatggaagctgtctgttgcagggaccagcatgaggtggggaggaaggat

SEQ ID NO: 1470 - DNA, 101 bp, Homo sapiens
ataaaaatgtgccaaatggaagcttattacatctattattattattaaaaygcgacagtaaccataacaattacttagtacttgaccaacaaaagcttttg

SEQ ID NO: 1471 - DNA, 101 bp, Homo sapiens
aaagatattattcaaattcaatacagataaactaaaaatcacacttactgracaaaaaataattgtaccatgcagttctcactgtttcactgttttaaatt

SEQ ID NO: 1472 - DNA, 101 bp, Homo sapiens
tctagagaggatcactcttaacaaccccttcctctgcccaacaaggctctyctcagtaataaatgtaaaatgaaacaaatgccaatggccacaaaggaaaa

SEQ ID NO: 1473 - DNA, 101 bp, Homo sapiens
gtcgtggatgcagcgcacggactgtacctgagggtgacgggccccaaagtygctgctgtccttgtagtctcccttctccagcaggtactgcagcccacggt

SEQ ID NO: 1474 - DNA, 101 bp, Homo sapiens
cctctgcacccatccacactgtgtatgactccccttaaggatgagaagggycccaagtaaataggtgggatgggtgacaaattaggaagaattaagttaag

SEQ ID NO: 1475 - DNA, 101 bp, Homo sapiens
ctcacctacacacatctacaaacaaggcccagatgcttgtagctaattcayctactaagttatctaatgtaatgtacatagctagctatccacctacctat

SEQ ID NO: 1476 - DNA, 101 bp, Homo sapiens
ggttaatggaactgctggatttccagagagggagtaattgaattctcctgygagagctcagatgggcatccagaagggggccttgaactgggcctctgtga

SEQ ID NO: 1477 - DNA, 101 bp, Homo sapiens
ttttcagatttaactaagtcttaggaattcagcaaacattttcatttcacrctctagtttccggaagccatggttccttctcattgctgtccttacctcct

SEQ ID NO: 1478 - DNA, 101 bp, Homo sapiens
taaataattatagtataaagtatctgatcagttctatgttggaataagcayaactcaatctggggatcagggaaagtgaccctaagcagagtcctggaggt

SEQ ID NO: 1479 - DNA, 101 bp, Homo sapiens
ggagcatggcattgaggagactcactactgtgcagattcaattccagactrgatgggatatcacaggagaccgcactagtaaaacttgttgcagttggctt

SEQ ID NO: 1480 - DNA, 101 bp, Homo sapiens
actgggctggatttctcataagactgtaccaaaaggttccttcttcactcrcatagctccagattttcctaaagcttcagatctgttaacagaatgtactg

SEQ ID NO: 1481 - DNA, 101 bp, Homo sapiens
cctcaactttatctctttccaaaggccttcctggcattctctacttatatsctttcatggagacattaatgaaagacttggtatgtcctgggtaccataaa

SEQ ID NO: 1482 - DNA, 101 bp, Homo sapiens
ctgtgttccggagaacagggaggcaatacaaagcaacctgcagttccaaayaacaataaattccaagctggataatcaaaaaatatgtatatattaatata

SEQ ID NO: 1483 - DNA, 101 bp, Homo sapiens
ataatatatattgagatgcaaaaaaaaaagaaatagttcatttgaaaatawgtacttgagcttgaattgttttggtgatgagctcctaggaaatgatttca

SEQ ID NO: 1484 - DNA, 101 bp, Homo sapiens
tacatatagaattaaactttgttctggaatgggagccctagttgcagtaaygtgtcataataaataattgcatattcaggattttgtgaaataggtgattg

SEQ ID NO: 1485 - DNA, 101 bp, Homo sapiens
aatgaagttttccagaaatgcgggtaaaattttaagaggctgacagcaaawgatattcacaattcaatttattttcatatttttcatttattttccagaaa

SEQ ID NO: 1486 - DNA, 101 bp, Homo sapiens
ctttaatgatccccagtttggcaagatttcaaaaatacaaccacaactttsaaaagaactatcatatttctgaacaccaataactacaagatactccacta

SEQ ID NO: 1487 - DNA, 101 bp, Homo sapiens
aatcaccacacacgctcaagtgtgctttttaagaaagatcaagccttccastgtaatttaatgataaaaaaaagaaggaaagatcaagcttattcccttat

SEQ ID NO: 1488 - DNA, 101 bp, Homo sapiens
ttgccatgagtctgctatttctggagtgggctttgtcctaagaagtgttamggaactgggttctgagaacatgtgctgacaggtgccaatatgagtgaaca

SEQ ID NO: 1489 - DNA, 101 bp, Homo sapiens
atgctagataaaaatggaatcaaatttatgcttgttagtgttgtgctacayggcttgataagtttttctcataagtaaataaaatatgtgcccttcaatct

SEQ ID NO: 1490 - DNA, 101 bp, Homo sapiens
ccttttgcttcagtgcagaagtagggctgaagacccacatgaagattgagraaggagatggatgtgtagagtctacatttaaattgatataagagcactaa

SEQ ID NO: 1491 - DNA, 101 bp, Homo sapiens
tttcattagagaccactgtaatagcctcaatggggtaagaccatattctckttgtcttactttgaggtttcctattagggaccaacgtagagcaaactaac

SEQ ID NO: 1492 - DNA, 101 bp, Homo sapiens
gtgaaaccttacaataaaatttcatttctattttttacaactgtaactgarcatctattcttatctgttcaaagtataactttttaaaaaggatgcttgta

SEQ ID NO: 1493 - DNA, 101 bp, Homo sapiens
tttatcttcttgtacacattgacatgtcaatcctgtttactaagcgatatwcaatgggtttcctatagagcagtgaaccttaacaggcagcttttaattgg

SEQ ID NO: 1494 - DNA, 101 bp, Homo sapiens
aacttctattgattaccagggttttcctccatgaaagggtttgaagacaayagacatttatgctaagggtaatattctcctcactgaggtccaagaattca

SEQ ID NO: 1495 - DNA, 101 bp, Homo sapiens
tagaaacaaaatacctaagaaatgatgctaataaacatgcttaataagtayccatgaagattttaactaacacatacagaatggttcagtttactctggtt

SEQ ID NO: 1496 - DNA, 101 bp, Homo sapiens
acacatgagataataagctagaatattagaatttattagaaaacaagttcrtattatcactgatatgtttactattttaagctctctggtccatcaatctt

SEQ ID NO: 1497 - DNA, 101 bp, Homo sapiens
gggttggtttgaattaggcatgatttgatctgatgctttatcttggtaagrgattccacctctgactggaactagctgcttcttcatacctacctttttca

SEQ ID NO: 1498 - DNA, 101 bp, Homo sapiens
acaattacaaaagcaggcacaacttattaaagttggtcccacatcatggcraactaaagcggggatttattctgtccctatcctcggagtcaggctagaac

SEQ ID NO: 1499 - DNA, 101 bp, Homo sapiens
tgggaatttattgtgattagaaagactgggaaggagttgttttggacaggraaattaagttttgttctgtacactttaggctcaagatgtctcttacacat

SEQ ID NO: 1500 - DNA, 101 bp, Homo sapiens
ctcattatatacttgctgagtgaatgatggaaggtcaagtgaacaaattaragaaatcaggcagaaaatatttccaggtatcttggggagttgagaattag

SEQ ID NO: 1501 - DNA, 101 bp, Homo sapiens
ctagggaggtgttttaaagccacacttacaaacacagagttctaatgcagratattaaagtgaaagtcaattgttgaccaacatgaagagcttacctttga

SEQ ID NO: 1502 - DNA, 101 bp, Homo sapiens
aatttttcctttaaaaaaataaaaagggcaaaaaataaaactcagaactgrtaagaaccacagaaattatgaatttcaaatctctcatttaagagaaagct

SEQ ID NO: 1503 - DNA, 101 bp, Homo sapiens
tcatcaactgattaatacataaccatgtcttatgtctgtttctgtttgaasgcacctcatttaatgtgtgctgttgattcactaacattgaatttggggca

SEQ ID NO: 1504 - DNA, 101 bp, Homo sapiens
ctcaggatgttagcaattctccactgttaagcaggtcttctctaggtttamaacagaaatagctaaggaggcagagctcacacctactttgtctatctttc

SEQ ID NO: 1505 - DNA, 101 bp, Homo sapiens
ccgacactggacttggcacttctttgcgttgactttacaaaatcctttcaygccccacatcattgattaaagattttgtgttgagacagagaaaatgatga

SEQ ID NO: 1506 - DNA, 101 bp, Homo sapiens
cagtttatctataaaatgggggccttaaactaaatcccaacgcttataggrtttagttagatgtgaataagtggagtggtctcttgtagggcaatttgaac

SEQ ID NO: 1507 - DNA, 101 bp, Homo sapiens
tgagcttgccagagttatctgggtgtttttcttggaagcatagataaggcratatgatggttgactttatgtgtcaacttagctagactatgatgtacagt

SEQ ID NO: 1508 - DNA, 101 bp, Homo sapiens
agttcctaaactgagtgtatgcagtaggtggtcaacaatattcattagtarattctttgtattcttcctgagggcaaaactgctaaaactccctggagaaa

SEQ ID NO: 1509 - DNA, 101 bp, Homo sapiens
atttttttttttaattaggggaagtggaatttttagagtgtcatgtgacgyatcattgtttgagaggataccgttgacatctctgctaactatctcttgtt

SEQ ID NO: 1510 - DNA, 101 bp, Homo sapiens
ggaacaaataaacatgagccaaacattactgctaagattgaggaggaagcygtttcctggattctttatcaagttcctgagcctgacactctagtggacca

SEQ ID NO: 1511 - DNA, 101 bp, Homo sapiens
ggtggaaaggagggtcttaaaagctctctgacaaggaaagaaatgatgagratgagatagttctatttattaaatgcatgatatgtgccaggcatttttcc

SEQ ID NO: 1512 - DNA, 101 bp, Homo sapiens
tgtgaagaggagaaggatgaagagatttcatatgaaggctatctcactatytagacatttcccgatttttctttgtccatacatgtaaataactcgggcag

SEQ ID NO: 1513 - DNA, 101 bp, Homo sapiens
ccagttttaaacttgctcagttagccacaatttaccttggctaacacattyttacaaaccagccaatcaatttcagctccttccttctgaaagtcagcact

SEQ ID NO: 1514 - DNA, 101 bp, Homo sapiens
tttaaattctgatcttcaaatacatcctgttaagcaactaataccttagcsacgaataaatgtgtatactttcacacggagagcctttcaaccgtttaaga

SEQ ID NO: 1515 - DNA, 101 bp, Homo sapiens
ctgttaagcaactaataccttagccacgaataaatgtgtatactttcacayggagagcctttcaaccgtttaagaggagtggtatagcacaacacttagca

SEQ ID NO: 1516 - DNA, 101 bp, Homo sapiens
aaaattaagtgcttttacataaacatcctattttttttagaattatatgcrcttattcactcatttactcatttattcatttactcaaagatagtagatgc

SEQ ID NO: 1517 - DNA, 101 bp, Homo sapiens
tattgtgttattttaaaatctaataagtgtattatacttattttcaagcayatttctggtaatttcaatatcttcggtctgtagttttgtttccatagacc

SEQ ID NO: 1518 - DNA, 101 bp, Homo sapiens
attacacaaagtctcctgaaatgataatttaatgctataatttccaactgwttctctatgctttactctggtataatctcacacagagttcttccaagaat

SEQ ID NO: 1519 - DNA, 101 bp, Homo sapiens
ttgttttaatttttcatgattggattttatagaaactttagaatctgtaarttaatacttttcaaaagatttagaaaattatctactaaagttactcttct

SEQ ID NO: 1520 - DNA, 101 bp, Homo sapiens
atgttaaataataatataccatgaccgcagaccacatatgggtactttaaraatataagcagtctgggccaggtgtggtggctcatgcgtataattccagc

SEQ ID NO: 1521 - DNA, 101 bp, Homo sapiens
ctctccatggtacccttacaatacttttctttttttttaacctctaatgcytcaaatgaataccttaggttcacttttgcttaggtcatgtactcttaatt

SEQ ID NO: 1522 - DNA, 101 bp, Homo sapiens
tgtttttgtacattattttccttgggccccaagcttatctctgctggactsttcatctttagaggttatgcctctcacaatgctggctttaaggtcctctc

SEQ ID NO: 1523 - DNA, 101 bp, Homo sapiens
atgtgcatgaattctagtcacaaataagtctgtttttcttggacagtagtraagtttaaattgtgtatttctaagaatgattttattaaataatgtctcca

SEQ ID NO: 1524 - DNA, 101 bp, Homo sapiens
tagcccaaatgggctatggcagacagttcggtatagtgcatccctttcaargagttgagcatagattttctttacacatctcatcttttaaaaacctttac

SEQ ID NO: 1525 - DNA, 101 bp, Homo sapiens
tgtaagagagcaacttaaaatgcagctcacagcatatgaaatgtctccagytgaattcgaaggactaaagcccaggacaaagcaaagagagaagcctagga

SEQ ID NO: 1526 - DNA, 101 bp, Homo sapiens
cctttgcctacgatgcccatccttctgcttcctgccaatccagaccttacytgttcttcccactctgagttccacctcctccaggaagctttccctgaaca

SEQ ID NO: 1527 - DNA, 101 bp, Homo sapiens
cagttctgttcccttctactcaaaatgttgcaattagacgtcccttatttkgagtcaggacactgtccctggttgatatgcaaagatcccaggaagatgta

SEQ ID NO: 1528 - DNA, 101 bp, Homo sapiens
aaaggactaatgacaactaccacacatgcgagatgtttgtgagagctatgytactttattagctgcacaattactagcattaatatacatagcaacagtat

SEQ ID NO: 1529 - DNA, 101 bp, Homo sapiens
ttctttacccttctcattattaatattttttcttacattaagcacgcaatraaagatacaaattataaccagattaattagaaaaaagaaaaacaatggta

SEQ ID NO: 1530 - DNA, 101 bp, Homo sapiens
gtatttgatggtctagaacagagccacatgtacaatgactacatgacactrtcgcttaggaaaaaaaagctagcatttgttgagtacttactttgtgtcaa

SEQ ID NO: 1531 - DNA, 101 bp, Homo sapiens
ataataaaaatacatttattgaaaagtttgaggcagagggagattgtttcrtatagacggaataggggctccacagggcatggttgaaaatattataggca

SEQ ID NO: 1532 - DNA, 101 bp, Homo sapiens
tggaataggatattgcatttgggataggacgttgactccagcctgggtagrtatttgatagaggttaacacttattgctgagttaggctggaaatttacac

SEQ ID NO: 1533 - DNA, 101 bp, Homo sapiens
agaactctactaattagctgtctccttcttgctaaactgttaactgataaytgataatcctcggggtatttgtatgttagtagagaattgtcaagtaagcc

SEQ ID NO: 1534 - DNA, 101 bp, Homo sapiens
gatgtagcccaggtgggtcatcttatgggaaataaaatgtatgatctattyggaagtatctgacaatatctgccaccaaaaaaaaaaaaaaaaaaaatcta

SEQ ID NO: 1535 - DNA, 101 bp, Homo sapiens
acagtttgggatgttttcttccagatgcaaatatttcatcttacaattcgyttttcatttctaaatcacaaacatcaaaattgagagatgtttcataatca

SEQ ID NO: 1536 - DNA, 101 bp, Homo sapiens
tttgcatggtataaaaactccttgtgatctgcatataaattccttgtgatstggtcttttgttacctcttcagactcattttttcatctagctgctcataa

SEQ ID NO: 1537 - DNA, 101 bp, Homo sapiens
tttgtgtatgtgtgcattttatttatcctgcctgggttctctctgagcttsttaaatccatggtttgttgtttttcattaattttggaacattttcatcca

SEQ ID NO: 1538 - DNA, 101 bp, Homo sapiens
aggtggaattcagcaggctcacacctattgggtgttagagagatgaacttmgatcacatttatttaaacatctctgagtgcagtatttttaaagatcacac

SEQ ID NO: 1539 - DNA, 101 bp, Homo sapiens
tgaaatagcaaagggaggttcatgttagttttatttatcaacttatacctrtcatatagcacagcatctggcacagaagcgacggtcaatggctaagaaat

SEQ ID NO: 1540 - DNA, 101 bp, Homo sapiens
agaaggctacagataggcttatacagtaaacatgtgaaaggtacagttgayttctctgcttgaatttgcacatggggggaattcgttctcttcttttgccc

SEQ ID NO: 1541 - DNA, 101 bp, Homo sapiens
gttagttattaataatgtattaaattgtatttagatagcctctagcatccraaagagtaagagtgtagttacttacccaagagtgtagtttgcatgttaga

SEQ ID NO: 1542 - DNA, 101 bp, Homo sapiens
ttagtacaatagcagcatagtttgataatgtattgtgttcttaagtacacrtgaagatatttaagtatttcctgattgactatgatgtgctcagtcttctt

SEQ ID NO: 1543 - DNA, 101 bp, Homo sapiens
ttttggtaaaattcttttttctcatttagcaaaatgtttgtttaaagccaytagtattagtacaatagcagcatagtttgataatgtattgtgttcttaag

SEQ ID NO: 1544 - DNA, 101 bp, Homo sapiens
tttatgtgctaagggaagttacattcagtgacaaattttagaaggcagcayggttgtagagtaagagtgacatagttttgaatcccagctccaccactctt

SEQ ID NO: 1545 - DNA, 101 bp, Homo sapiens
agccatatttcttgtaaatttttaaaaatatttataatagtgcctttaaartccttgttttctgatcctgacaactgagtcacttgcgggtctgcttccac

SEQ ID NO: 1546 - DNA, 101 bp, Homo sapiens
tctaaagtaacttcctgccctcaaagtctgatttctacaatttactatacrtatttatgattactgggtgaggtacacttacgagctagcttgattgaata

SEQ ID NO: 1547 - DNA, 101 bp, Homo sapiens
cagtatgcaaatatgtaccaacaacaactgtatgtatcaaaagtctttccrtattgggtcatttcattctcaggatgtcagaaacattgctatttcattgg

SEQ ID NO: 1548 - DNA, 101 bp, Homo sapiens
tcagagcacaggacccttgatcaattatgctccctgtagttggatatctayaagacacattctcatagttgccacagatattacattaatgtcattattcc

SEQ ID NO: 1549 - DNA, 101 bp, Homo sapiens
gaaaaaaagtgaatctttttttcataatttattctgaagtattggtacctsggtatatcagtcagaccttttgcaggaactggaaactatgctaggtgcat

SEQ ID NO: 1550 - DNA, 101 bp, Homo sapiens
gtctttttttctttcttcagaattcctacgatgattttgttctcatgttcrcaaaactactgttagtagccttctttattttactactgtaattcccaaga

SEQ ID NO: 1551 - DNA, 101 bp, Homo sapiens
ttgctgtaagactgggagcaatgctcacggggtctatagtgatgtctcctytcattcttgatattgatcatttatcctgatatttatgcatacatactttt

SEQ ID NO: 1552 - DNA, 101 bp, Homo sapiens
ataatattacattcaagaattaagagactcctgaataatttatcattttgyaagtataagtgatcactaataatattgcattgttatttattaacatttat

SEQ ID NO: 1553 - DNA, 101 bp, Homo sapiens
tcccagtgctctgacctattttacagttaaaggctccaaataggatataayctgtgtttagagcttggacatgggagagatagcagtgactgcactgagtt

SEQ ID NO: 1554 - DNA, 101 bp, Homo sapiens
gcatttctcttctaagacttcgatgaattaagaggataacaggcagtagcrgtcctgaagaacagtggtttgcaaacttcagggttcctaaacacaacctg

SEQ ID NO: 1555 - DNA, 101 bp, Homo sapiens
gggaaacaagcctcttgggtttcacacagaaattctatacaatgagggtawttcccatctactgagcagggaagaattcttctgcaatttagagataattc

SEQ ID NO: 1556 - DNA, 101 bp, Homo sapiens
tggtgtctacatttggtaatttgcctccaacaccaacaccaaagggattargtggatttttcctctgaaggccacacactgccttacccttcttctccccc

SEQ ID NO: 1557 - DNA, 101 bp, Homo sapiens
ccctgcaatgcattctgggattagtgtaacaaaaataatagtacttcttaygtctggcactacacactttagtatttatcactccacccatgctgttgtat

SEQ ID NO: 1558 - DNA, 101 bp, Homo sapiens
ttgaaccactgaagcagggatttcttctaaatctctcatcacccacattaytatgatgctttcttccatttcccaacttcctatcccttccaaacccctca

SEQ ID NO: 1559 - DNA, 101 bp, Homo sapiens
tcatctcccacaatgacagaataatttacctaatgaaacagtccaatcaartagttctctgcttaaacctcttcagttttcttccatgggtaatggcatag

SEQ ID NO: 1560 - DNA, 101 bp, Homo sapiens
tgactcccacatttttgggtaactaggatgatatatgtgatttttaggatkgtttccaacaggatatctttaactgtagatggtgaatacctgttgtctac

SEQ ID NO: 1561 - DNA, 101 bp, Homo sapiens
gactcatttcctagaactggatttgattcataataattgctaacgcctttsgctatggcgcatttactgtaggccaatcctctcccatgcattatcacatt

SEQ ID NO: 1562 - DNA, 101 bp, Homo sapiens
cctcccgcagaggattgtttgaggtgaccagtagccagatagtagaagatygaggagtgaataagagagtaaaggaagtggaagcatctaggctgggaaag

SEQ ID NO: 1563 - DNA, 101 bp, Homo sapiens
taggaatgacatttccttcttctgagcaacttgaaggtgctacagaccaawggaatataagggattcattatttaatgtacaaaattcaggctgctgcttt

SEQ ID NO: 1564 - DNA, 101 bp, Homo sapiens
acaccaacttgttaaaaacaacgctgaaagcagcaaacaatgaagattggkttgctactaggataaaacagtttgctgctatttaatcttgatgtttcagt

SEQ ID NO: 1565 - DNA, 101 bp, Homo sapiens
tcacttccttaggtgcttataattagctgagtgtgtgtctttcttaagggyagcgatcttttcttactcatctctttattccttattctgtgtagcatagg

SEQ ID NO: 1566 - DNA, 101 bp, Homo sapiens
atattgatgagtgtgtgtgtacatgtgtgttttacaatgagaatttacttrtaatcagaaaaaggtaagctattttcattgttagtgaaaatttaaatata

SEQ ID NO: 1567 - DNA, 101 bp, Homo sapiens
gtctcattcacttggcaaacaatttcatttctaactgttatttcagccacrgatatgatttctttaacacagcagaaaggaggagattaaaatatgagata

SEQ ID NO: 1568 - DNA, 101 bp, Homo sapiens
acagagggcagtgtgagggatcctttctagtcaccgggaatgacagacatmatcaacagttagccaggaaatcacaaataaaacagctacccctaagaagg

SEQ ID NO: 1569 - DNA, 101 bp, Homo sapiens
ccaccaccagcgctctgtgtgtagcatttttagtgatgattcaaagaacasgtagaagcaacttctaggggacttctctctgagcatgacatgctgaacta

SEQ ID NO: 1570 - DNA, 101 bp, Homo sapiens
tcacaggcacacctagtttttttaatttttcctctataattaatttccttragtcactgaatacctttatctaccttctgccataaacgtctcattttctc

SEQ ID NO: 1571 - DNA, 101 bp, Homo sapiens
gccagagtcattttatctataacataaggagataggactggaaaatttccrtgagacccttcattattagaatgccatgattctaatcgccacttgaaagt

SEQ ID NO: 1572 - DNA, 101 bp, Homo sapiens
acctcctcactctgactgaaagatcacatcatccctggagaatttattttrtctcaaagtcagtatccgaatagttcctgaaaagtttgaaagtttccatc

SEQ ID NO: 1573 - DNA, 101 bp, Homo sapiens
ctatttggaaagggaattaacaaaatcagtataagacttgggagctttctrcaaggagtttataaatctcgtcggagagaagggacaggtttctttttata

SEQ ID NO: 1574 - DNA, 101 bp, Homo sapiens
aaaagatgctgttaaaactatgagaatacatgagatataggtggttattastatttggcattcacacccaaatatctaatcactaaaattattattaataa

SEQ ID NO: 1575 - DNA, 101 bp, Homo sapiens
cctaaatacattttagacctattggcatctaagttacaatgacttatgctrtatcatctattttttatttacatttctttgtagtattcatatgcatttaa

SEQ ID NO: 1576 - DNA, 101 bp, Homo sapiens
ttgtttcccaaaggatggtgctataattgtcaagaattagtagttaattamagcaggttaccagaaataataaataatacttggaattaaaaaaatgctgt

SEQ ID NO: 1577 - DNA, 101 bp, Homo sapiens
tctctctattattgactctagcagtccagcttcagtccaagcatgtataaktcactgggattctcattctgggaaatgcaatcttctccatctcagacaga

SEQ ID NO: 1578 - DNA, 101 bp, Homo sapiens
ccctgggaggaggcagagtgtcagaattactcccatcttactagtggatayggtgaattcacactggctttctttctgttggtggatcagaccaagctctt

SEQ ID NO: 1579 - DNA, 101 bp, Homo sapiens
gtgtgatatgattcataaaatccgtgacctcttcacccagctctcaagctkcattttcattacagtcttttcatcatcagaattttggcttcaagttgttg

SEQ ID NO: 1580 - DNA, 101 bp, Homo sapiens
taatactttaattattgcattaagatcattgaaagataatcaagaggatgytctttttgacactttccttctaggaggatgctttggttgttcaatcattc

SEQ ID NO: 1581 - DNA, 101 bp, Homo sapiens
tctgataaaactgtaacaaacctattcaataatacatatggcattgagatrtacccaatagtcactcatccttcacaagcaaaggggatgctgaaactgac

SEQ ID NO: 1582 - DNA, 101 bp, Homo sapiens
cacactatacctggttcttgccttgaagttattgtttcgtaattccggatkggctattagatgataacgtaaagactggcccctttaggagtatttacatg

SEQ ID NO: 1583 - DNA, 101 bp, Homo sapiens
aatcttaatgtccatatgccctacattttataggctgagataactagcaamttattgccaaggtactagtacaattctagcagtgtgaccttgggtaaatt

SEQ ID NO: 1584 - DNA, 101 bp, Homo sapiens
tctggcctcttccaaagcagaaggctctgggctgtagaccttcaaatagaygcaaacatgcaaagcttttaaaagctctgacttctgggaatggaacaaat

SEQ ID NO: 1585 - DNA, 101 bp, Homo sapiens
tctgtccttcaaatttcaatctagaaaaccaaagtatattttcatgaatcraatgttcaaatagtaagatttaagacaatcctctgttgtggaaagccaaa

SEQ ID NO: 1586 - DNA, 101 bp, Homo sapiens
taaatatcaaattaaatatcctcaggatgtaaggagcctcaaaataagatygtgtgcattgtgtcaatgacaagtttcacaacttcctacataatgaagaa

SEQ ID NO: 1587 - DNA, 101 bp, Homo sapiens
cagacccagaatattaacaggggcgttgacatcagtaattactatagttaygagacatttttcacaaagtattatgagagcaatacttagttatacaggga

SEQ ID NO: 1588 - DNA, 101 bp, Homo sapiens
atttgccttggttcttataatagcaacaaaaatgatgaaaacattgttatkattgtataactctcactgaggacaacattttttaaaatagataatgggaa

SEQ ID NO: 1589 - DNA, 101 bp, Homo sapiens
tagtgtgccagagtatcccaaaggaatatctgcaacctctgaagacagatycagccaacttaccatgttacccaggattagaatttatggcaaggggggca

SEQ ID NO: 1590 - DNA, 101 bp, Homo sapiens
gaatcacaaattcttcttgaatggggtttaggctgcacttaacattatttstctggagactgatcttagtccttaatttcaagtctatgccaaactcggtc

SEQ ID NO: 1591 - DNA, 101 bp, Homo sapiens
taagatgccacagtaaaccccttatagcatatactgagttacagtttagtkataggttgaacacatgcagttcagcctgcctcccccacccctgaggaagt

SEQ ID NO: 1592 - DNA, 101 bp, Homo sapiens
aaggaacatcattttggcctccccctcagctttttcctaatagttgaaatygtgagtttaaaatataaatagaatgatctgttcaactttataatgctgca

SEQ ID NO: 1593 - DNA, 94 bp, Homo sapiens
cctagctaaggtaaatttttttctgacacagaagatatgttgcctagagcycgatgctatccaagattatctatctaggggcagcacagacaga

SEQ ID NO: 1594 - DNA, 101 bp, Homo sapiens
gggaggaaaagatggtgaaaacctgggatcgtagcttgtgaaggtaggagwagtaggaggaaccttccagggcactgagaaagaaggcttggtgtgggaag

SEQ ID NO: 1595 - DNA, 101 bp, Homo sapiens
ctgattcttggagagaatgaatacagtcaataaaaatctacagtagtaaamtaacattgagtctgggaggctggtgggaatgattaatgaaaggaatttat

SEQ ID NO: 1596 - DNA, 101 bp, Homo sapiens
ttactgcattttacataatgataaaatataatgagtggtcagtaagaaggrccaatatttaatgaatatagttttttttaaacaaagtgtagataggtcat

SEQ ID NO: 1597 - DNA, 101 bp, Homo sapiens
taggtctagaaagtatatgtcctgaaatacatacttatgtgaagtaagtakgtgaactcaaatacaaagccacattacaatactattgtaacttcttttct

SEQ ID NO: 1598 - DNA, 101 bp, Homo sapiens
tctaccttcattaaaatgagtagaaaatattattttatcttgaatagttgygttatgtcaatagcttaaaagttttagtgccaaattcttttttctttggt

SEQ ID NO: 1599 - DNA, 101 bp, Homo sapiens
atagagttccatgtcaaatcatgtggagtcattgagttctatctaacctcyagtctacaacttttggctcttaattcagagagccttggttggcatgggtg

SEQ ID NO: 1600 - DNA, 101 bp, Homo sapiens
atcaaattttcaggtttggactggaactatatctatcacaggctatcctcrgtctccagtttgcaggtggcagatctgggacttcttaacctccaaaatgg

SEQ ID NO: 1601 - DNA, 101 bp, Homo sapiens
ggtgtatctatgagagtgtttctgaaagactagtattttaatctgtagacygagtgaaaataaaattgccctaaccaatgtaatgggcataacccaatctg

SEQ ID NO: 1602 - DNA, 101 bp, Homo sapiens
gctacataaaacaagacaggaaggatttggactcagaggtaatccccttayggtagtgagcattatccaggtaatacttaaagtagtttaaccttcttctt

SEQ ID NO: 1603 - DNA, 101 bp, Homo sapiens
gaataagccatcaatttccatttactgtgaacaccacactactacgttttyaagctgtaatgggaaggaaaacacggacttgtttccaaaactcccctgtg

SEQ ID NO: 1604 - DNA, 101 bp, Homo sapiens
tactttccgttagaaatttcagattttattatatgaaatgcagagttgacrtacagtgattaattcagatgtgcatagatacaagattgctgaaatgatat

SEQ ID NO: 1605 - DNA, 101 bp, Homo sapiens
catgccccaggtctttctccctaaactgaaatatggatttaagctaggtcrtcctacctttctgtgcctgctcccatcccaacttgaatacacaaagcctt

SEQ ID NO: 1606 - DNA, 101 bp, Homo sapiens
aggtaggcagtagtacttattcaagatccttcagattatacattttatcaygagaaagcttgtgaggaaaccacagagaatgtggcccctctgtgctgggg

SEQ ID NO: 1607 - DNA, 101 bp, Homo sapiens
ctcaaccaaagagccgtggttttgagatctgataccaatgatgtcctcgtsagttttattgctcttcttctcaagttttttttctcaattaaaggtacagc

SEQ ID NO: 1608 - DNA, 101 bp, Homo sapiens
gccaagcccatctggtcattgttcagtcccctgactaatgaatctctgacytataaatctttatgtgtggccatatgtaggtacatttttttcctactgta

SEQ ID NO: 1609 - DNA, 101 bp, Homo sapiens
ctggttgtttatcaatttagataatctactttttcttaacacaattgatgrtttatgctttattgtgatataatccattatatcagtatttacaaacgtat

SEQ ID NO: 1610 - DNA, 101 bp, Homo sapiens
ttttttgtattttaacagtcccttccagaaactctttttattccactaatscttcattctatactttaaaacatttttttaattctataaatttacacagt

SEQ ID NO: 1611 - DNA, 101 bp, Homo sapiens
agaaaatagcatgagaacagctagttgcaagtagtcatatgttgcttaatyttaacattcattcttttaagtgtttttttttttttttttttgacggagtc

SEQ ID NO: 1612 - DNA, 101 bp, Homo sapiens
ttacaaattgaaagataataaaataattatctctagttgcatagttactgwttttagcattgcaaccatattgcacttaataccttgataatgtttataac

SEQ ID NO: 1613 - DNA, 101 bp, Homo sapiens
gcctttccattcctcccacacccctgttgagacaagtcccaggtgcatctrtacacttgccctacctcctcccacctctgccgcacccccgccaccgtcat

SEQ ID NO: 1614 - DNA, 101 bp, Homo sapiens
taaagccttggcctgaaagtggctctctaacttgggtccacatttctttcrctaagttatcacatgggcattcctgagtccacaggcagggctgtagactt

SEQ ID NO: 1615 - DNA, 101 bp, Homo sapiens
taaaacgtttctcagtttgtgtttgtctaatgttctctcatgattagatcragattagacattattgggaaagataccacagaggtgatgtgcatcttatc

SEQ ID NO: 1616 - DNA, 101 bp, Homo sapiens
tattccaggcattcaagactggttcaacattcaaaaccaattaatgtatcrtgtgtacaaattaatttaaagtggatcgtagacctgaatgtaagggctaa

SEQ ID NO: 1617 - DNA, 101 bp, Homo sapiens
gtgaggaccagtggctaatgcttctgctcttggtcagaacagccagtgcakatcctcagaagaactctgaaagcaaaattgactcccaccccacttctaga

SEQ ID NO: 1618 - DNA, 101 bp, Homo sapiens
gctgtgttagttataaagacctcgtagttttgggggtgcagttgccctgartacctgcctgattggcccttgtagtagaccctggcagacccaggccctag

SEQ ID NO: 1619 - DNA, 101 bp, Homo sapiens
ttaatataatgaagaacagtctaaatttgagaaggatagcagtggatgatytactaggtagtgagttctttatcattagacatgatcaagcagagtatgga

SEQ ID NO: 1620 - DNA, 101 bp, Homo sapiens
acattacaaagagagtaaaagccttttgtatttccctccactcactctgakaaaaccactgtatacatctccaggtttttaaatgtaagaatttgcataaa

SEQ ID NO: 1621 - DNA, 101 bp, Homo sapiens
agagaagaaaaacttggtgaacatttgaagcattcagttggggatttcatyttagtagtaaaccagccttaataaccacagaaaactcgaggattcacagt

SEQ ID NO: 1622 - DNA, 101 bp, Homo sapiens
tctgttctgtcaatactcttttgaaaaagaagagggggttctgatcagggmaaaaagaatttggctaccacgtaatggttcagaccaaagatgtagaagaa

SEQ ID NO: 1623 - DNA, 101 bp, Homo sapiens
tgtttgagtttaggatctggcactgtaaattcggaaaatgggatacattayctctagtgctcctttcaaatatagcattgaacagtgtatgtacacatgca

SEQ ID NO: 1624 - DNA, 101 bp, Homo sapiens
attgatttaataaaatgttattatcttatgcagcttagttcatagggatayttttcatactggcttccttgctctaaaatcggacagttttcaatttttca

SEQ ID NO: 1625 - DNA, 101 bp, Homo sapiens
ctctagaagtttccgtttttcctccttaaaatgggaggtccaacctgttayaagaattagaattttctctgtcaaacatctaagagctcctggtgttgagt

SEQ ID NO: 1626 - DNA, 101 bp, Homo sapiens
ttcactacttcataccccaacaatagtagcagctatttaatgggtttactytgctgttacttctgttgccaagggccaggcccatctctcccaaatatcat

SEQ ID NO: 1627 - DNA, 101 bp, Homo sapiens
aagatttccaattcttgctattttcagagttcagctctcatcagtgtgagmagtgccaagtagcaggacgattggattttccagaaaacggcaacctctaa

SEQ ID NO: 1628 - DNA, 101 bp, Homo sapiens
gagtaatggatgctaaactatttcaaattgttcttggctgctgaagtttgygctaatgccacattacataccatattcactataatactagattttgttgt

SEQ ID NO: 1629 - DNA, 101 bp, Homo sapiens
acagagttgacacaccaagctttctaagacctatttacaggacgaaaaaartacttaacacatgataactgttagtccattactaaacttcatcttttcac

SEQ ID NO: 1630 - DNA, 101 bp, Homo sapiens
cttaacacatgataactgttagtccattactaaacttcatcttttcacccrcagattgacatttgagtagtgaaatgagggaggagcacgttttgatggta

SEQ ID NO: 1631 - DNA, 101 bp, Homo sapiens
cagaaaaattttgttctgagaatttgaggatacaaaagtgatcaagctacygattcaaatttagttaattttttaaaaaaagaattggctatgcactatac

SEQ ID NO: 1632 - DNA, 101 bp, Homo sapiens
gagactccctaagaaacctgcattctatctttccctgaccattcaatttcygtacttccaccagagcccaacttctatcagacaaactccatgctatctgc

SEQ ID NO: 1633 - DNA, 101 bp, Homo sapiens
gtcaaatttattttctacttagaagcatccagaatccctgcctcttgtaaygatggaaacctctgtttgagcttaaaaattagtggtttcaattagccggg

SEQ ID NO: 1634 - DNA, 101 bp, Homo sapiens
gttgcagaggcagagatcccattactcggccttgcaatctataacttcctygtgccttgtgtcttacagaaatttaaagagtatgtgaatggcagtaacct

SEQ ID NO: 1635 - DNA, 101 bp, Homo sapiens
agacatagacggtgaccataagcagctgaataatgaactgcattgtatccytgcttatcacggatccctggatttgcatcgtttcttaataagtattccag

SEQ ID NO: 1636 - DNA, 101 bp, Homo sapiens
ttataattgtttttctacttgtctaacttctccactagattggaactttcyaaaggcatcatcagtgtctggcacaggacttagcactcagaccaaattcc

SEQ ID NO: 1637 - DNA, 101 bp, Homo sapiens
attttactacacataaatgtgctggctgatcacactttaaatttattaccrcaaacctccagtgggccttccgagctacctagcaatcttctcatttctcc

SEQ ID NO: 1638 - DNA, 101 bp, Homo sapiens
aatgtgataaagcatttatttggcacatagtaagctctcaaaactgatgcygtcactgatagactttatgtcagttaaaatctacggtcatatttttcaag

SEQ ID NO: 1639 - DNA, 101 bp, Homo sapiens
aatggcctctggctaacatccaggaagaggagctaaatatttaactctcarattattatgaacatggtccaaatgtctggagccctaaagaggcttcctat

SEQ ID NO: 1640 - DNA, 101 bp, Homo sapiens
ccactctgtgtactgatcgcatgcattgagcattttgttgacttccgttgytttccgagtaagggaagtcttagaaatgctgccctctttctcccaaatct

SEQ ID NO: 1641 - DNA, 101 bp, Homo sapiens
aaaacaggtttaggcatagttcagcaatgtacaaaatgtggaataaaaccyagtgacaattcaaaattaggctttagcttaccacagtgttactgtgggaa

SEQ ID NO: 1642 - DNA, 101 bp, Homo sapiens
ttacttctaaggaagtgaagtagtgaggatacatatgcgtatttctgaagracctaatctaccacaaataaagatggtcacttttaaaaaacaggtttagg

SEQ ID NO: 1643 - DNA, 101 bp, Homo sapiens
aggctagaaatctagagtagccaagtcaccacgcatcttaaatgccacaayaagaatgattagtgatggaatcttccaaggctcctacagatattacaact

SEQ ID NO: 1644 - DNA, 101 bp, Homo sapiens
tattcaaactactgacaactatggctttatcataccagtgacctaaaggamataagaccagctttacaccaatcattaaaatcattaaaagcaatagaaaa

SEQ ID NO: 1645 - DNA, 101 bp, Homo sapiens
cgagaaaaacctcaattccgtgaggagcaataaaggcaatgcatttgcgtkctatgtattagccatgagcagtggccatttcactctgtggatgcttggaa

SEQ ID NO: 1646 - DNA, 101 bp, Homo sapiens
caaatgttcattttatcttcgaaataccttttatagaaatatctagaatascatcagtaaatatcttgtaccacggcctcaccaagttgacacataaaatt

SEQ ID NO: 1647 - DNA, 101 bp, Homo sapiens
taggaatacagtctagaggaatgctctcactcttgaatagatgtacagaawgctaattaaaagtttggttcagaaaattgcaaacaatctaaatgtccata

SEQ ID NO: 1648 - DNA, 101 bp, Homo sapiens
gatgagatggtggcttggttagaaggtatgaagtggtcctcacttaaggcrgtgacattcaggctttgggggtggctggcaatagatctggaatgctgcac

SEQ ID NO: 1649 - DNA, 79 bp, Homo sapiens
attataaattatcaggactgttgagttayattcagtttttgtttttgtttttcaatggctccttaaggtttgtactccc

SEQ ID NO: 1650 - DNA, 101 bp, Homo sapiens
acctacaggccagaattgccacatcttgagggctatccattggtattcttygctggtttggaagtacagcactgtcctctctgtgattacacgtagtagaa

SEQ ID NO: 1651 - DNA, 101 bp, Homo sapiens
aacctttaaggcagaaaaactcttttggaaatcaaggcttgtagtttaaayagggaattaggaaagacttctatgaaaatgtgatctaaataatgagaatg

SEQ ID NO: 1652 - DNA, 101 bp, Homo sapiens
ctttgttgttatgatgggaatagctttcttttttgcagctttttaatatcmcgagaacaagtatagagcctcctcctatgttttgactttatttttatttt

SEQ ID NO: 1653 - DNA, 101 bp, Homo sapiens
gaacagatttcctgccacattactctccccagcattgtgttttgtgcctayttcacagtgacagcttatccccagtctaaacctacactgcctagtgagtc

SEQ ID NO: 1654 - DNA, 101 bp, Homo sapiens
gaacctcttatagatagcatatatttgggtcttgtttttgtctattctgayggtctctaccttttaattgaattatttagtttgttaccctggattataat

SEQ ID NO: 1655 - DNA, 101 bp, Homo sapiens
gccattaaggcttgatccaaagaagattttagaatatttggaagagcaatyggttatattccctggcaactgcctagggccatgactctcagccagtgtat

SEQ ID NO: 1656 - DNA, 101 bp, Homo sapiens
cctagggatggggtggggtagaaagtaaaagaaagagaatgaaacttattrgtaaccatcatatctgcctacatcaaactttcttttttttttttttttaa

SEQ ID NO: 1657 - DNA, 101 bp, Homo sapiens
cactgcagtgtaattccttcaattggtctgatgatgttattggtattatcstcactgggcctgattttcctgaagggaactgagctgtgtgaccttcgatg

SEQ ID NO: 1658 - DNA, 101 bp, Homo sapiens
taaatggcacctatttttcttcagttaataatgtaaaaaagactgtattgwcatgaataaattcccaagacccccagttctttagtgatgggctaaatggc

SEQ ID NO: 1659 - DNA, 101 bp, Homo sapiens
ctctcatcaaacaagggcaattttgcaagtgtttcaaagggaaaatatgargcagccaccttacagtcctgatttggctctttcctccttgacttattttt

SEQ ID NO: 1660 - DNA, 101 bp, Homo sapiens
catctcctctccttctatctccagaaaggcatgggaaaagaaatatgaaaygtaaatggtaaaatgttgaagccaggtgacaggttatgggaattcactat

SEQ ID NO: 1661 - DNA, 101 bp, Homo sapiens
agggaagagaattttaaaactctccgttgtggctcatttgtacttctagtycttccctctgattagctccagtaggacgtgttccttcttttcaaaagtgt

SEQ ID NO: 1662 - DNA, 101 bp, Homo sapiens
aagctcaagctttcattatatgattttttttttaaattccaaaagaataaygatagtgtatagataaaatgtggttaatttccctactcaccatccctaat

SEQ ID NO: 1663 - DNA, 101 bp, Homo sapiens
aagtgtacggtttctgccatctctcattgttttccatacatcctaccaatyagattttaagtttcagcaacctcattagtttttcaggctttatgactcaa

SEQ ID NO: 1664 - DNA, 101 bp, Homo sapiens
gaaccacagagtggctcttagaacttctgctgggaagtggcatatgtcacktgtactcacatttgtttgcctacaacacgtcaagcctgatatcaatgggg

SEQ ID NO: 1665 - DNA, 101 bp, Homo sapiens
agcagcagagctgtcattacctttaggttctaaacgacaaggtagagagaygtgaatggaacccaaaaaagagaaagaacaggagctattttgagagaagc

SEQ ID NO: 1666 - DNA, 101 bp, Homo sapiens
aataaaattactcaaagcttaatttgctatatgcatgtgtcatgcattatwaaatacaatttgttaaaggagaagtggttctcgtcttctgggactttact

SEQ ID NO: 1667 - DNA, 101 bp, Homo sapiens
agcattctgttttcttaatgtctcctaccacacttaagcactcagctgttyattttagtgtcagtctgcaaacccttgtgtatttccatatgaatctaact

SEQ ID NO: 1668 - DNA, 101 bp, Homo sapiens
cctttctagcaattcaagaacagcctaatatagtggctctaccaaagaacytacatgtgtcctcttcagaatggtggattccaggtagtaagatttcctag

SEQ ID NO: 1669 - DNA, 101 bp, Homo sapiens
agattcaaattacaacttcagagagcaaattaaaaaacaccatagggaatyacctttgatctaggcaataaagaagtcataaatttacctgacattttaca

SEQ ID NO: 1670 - DNA, 101 bp, Homo sapiens
ctatactaggtaacccatgcaggccaagtggtgtgttaattctgtcctacrgcatctaagtattggcctacagttatagaaacttaataattgtctctgaa

SEQ ID NO: 1671 - DNA, 101 bp, Homo sapiens
aaattcatattttctattatgatgaaccataagaagttaccgttaactgaytataaatggccattttataaggttcaagctcatgagctgaatataaatat

SEQ ID NO: 1672 - DNA, 101 bp, Homo sapiens
gtcataatcactgctgttcattaacccgtggctaccctgcaacctataacrctgtactgggttttctggcctacaaggtgaccacaattaacggtttatat

SEQ ID NO: 1673 - DNA, 101 bp, Homo sapiens
agaagaatcacgaaaagcagaaagttactaaaagatgaaaaaacggggacygtcatcatcataattttcaaaacagattttgaaaattattgacctgatat

SEQ ID NO: 1674 - DNA, 101 bp, Homo sapiens
tttaaatctatcagcctgtaatttgtttttatatctctcatctgctctttrttctcttttctctttttctgccctttgaattaactgatcatattcaataa

SEQ ID NO: 1675 - DNA, 101 bp, Homo sapiens
gtcatgataaactgagtctcttctaaatttgcatatagtgaaaaataacasgtcaaaatgcatttgcttagaagctcaggaatccattgttcagttaaaac

SEQ ID NO: 1676 - DNA, 101 bp, Homo sapiens
aaaatcctgcctctacattgactcccttctttgagctttggtgtccttatytgaaaagcgagatgaataatatctactttatgaagttgttgttagaatta

SEQ ID NO: 1677 - DNA, 101 bp, Homo sapiens
taaacacattatatataatatgatgcagatcatgggttaaaagtatggcgrtatcactgaaaatcagaaagatgaccgacctcaactactttcaggaatat

SEQ ID NO: 1678 - DNA, 101 bp, Homo sapiens
ctgaaacctttcaatatctcccatcacctacaagatacagctcaaacactsatgatgaaattaatattaattaagatctagtcctacctacatttttagcc

SEQ ID NO: 1679 - DNA, 101 bp, Homo sapiens
ggctaccaaatatatactaagtaccagtgcacctatataaacaaatcagcmttatgtgttccagatttgttctaagattgttgtaaaatcccttgttttaa

SEQ ID NO: 1680 - DNA, 101 bp, Homo sapiens
agaaagcactgacatatcctgaggatatatccaagacatttcaccgtcttktaacagaaaacataattcagtttgaatgttagatctgcgtctagaattct

SEQ ID NO: 1681 - DNA, 101 bp, Homo sapiens
acattcttcattctgttttatggcaaagaagaaaataagctgataaaggamttttaaaatctgaacgatagatttcaggatgtggagtaggaagaaccctg

SEQ ID NO: 1682 - DNA, 101 bp, Homo sapiens
gaatatatggtatataaaagatgcacattgtgatattaataacataaaatstgaggagaggagaaattaaagtgcagagtttttgtatgtggtttaagttc

SEQ ID NO: 1683 - DNA, 101 bp, Homo sapiens
aatgagtgacatcaaattgcagtcaaggaggagggcatgagtggagaagtmgttaccttttaccttggttctctgaaccatttggaaacacattcttacat

SEQ ID NO: 1684 - DNA, 101 bp, Homo sapiens
tgaatggaatggctctcagaaatcatgtaagaggactttaagtatattccrtcctgtaatctggagcaatgaagtcagagagctgataggacaaaagtaga

SEQ ID NO: 1685 - DNA, 101 bp, Homo sapiens
agttagaaactagtaaaaatgtttcttatacaattcacgtacttaggaacktttaaattctcccaatttgctgttgaatcaaagaggaaaattaagccata

SEQ ID NO: 1686 - DNA, 101 bp, Homo sapiens
ggtagaagggagttgatcagtcaaatttaggagcacagaagttttactagrcattttccctggttatggagaaatataggaaacattttgataagaaaagc

SEQ ID NO: 1687 - DNA, 101 bp, Homo sapiens
gacccttggcacagcttccagttcccacagccaatttaactcaagaatttrtaaggagcacagaaaggttgattgagaaaagtgagaagagatgaatctgt

SEQ ID NO: 1688 - DNA, 101 bp, Homo sapiens
gtgaatttcatagatagcctgtttataaatgcattctgtagctcacctaartaggagtatacccagttaaggcagttcttgggaggagactaactactcat

SEQ ID NO: 1689 - DNA, 101 bp, Homo sapiens
agtccaatactcactccttcacaacacatagtctctatgtatatccaatcrtagataatctcatacattttatgacatgtagactaaaaagggatttctgc

SEQ ID NO: 1690 - DNA, 101 bp, Homo sapiens
tggttatcattattgctattaataaaaagaaaggaccttgggttagtggayatgaccctggaatggaagttgaaacttagtgcttggcccattaagacatt

SEQ ID NO: 1691 - DNA, 101 bp, Homo sapiens
gccatgtagtgattgtactttctttgggattagaattgctactgaatgaawgtaaaagccaaaaccaattggtgggtttgatgttccagttaacccactta

SEQ ID NO: 1692 - DNA, 101 bp, Homo sapiens
aaagtgggaggcttagactaggtgatctccattcttgcatacagtgttcaragaaacataaaacaccatatgtattttccatctgcagttgattgaatgtg

SEQ ID NO: 1693 - DNA, 101 bp, Homo sapiens
cccaggtctgagcttaaattctcagatcctcttggtctctgaaggaggtcygaacaatatcaggctaacagtagctttttcttaaatgcatgcagatacgc

SEQ ID NO: 1694 - DNA, 101 bp, Homo sapiens
atgtgtgagaatcagaaatcatctagatcatgtttagtgagaggaagcgaygagcctgaagctttccctctttcttctttcaatcactttctattttcttc

SEQ ID NO: 1695 - DNA, 101 bp, Homo sapiens
gcatttgtaactgctgggttctgctgctgcctgctggtggaaatctgtacytgcattatactggagaagcccttcctagagttccagactgattttcctgg

SEQ ID NO: 1696 - DNA, 101 bp, Homo sapiens
atcttgtaattaaggttcatgtatataagaagtatttaaaaaagagattgrcagtctaagcattcgtcagtgtttaccattgcattccctcagttttcttt

SEQ ID NO: 1697 - DNA, 101 bp, Homo sapiens
ttatttaaaactttttattcaagtaaccaataatggataaaaatgtagaartgataaatgttcagctcaatgaattactgtattatagaattaacactgtt

SEQ ID NO: 1698 - DNA, 101 bp, Homo sapiens
tgtttgttaaatgtctctccttttttttttttttttttttggtattccttwaagatcagcattggcatcttcccactaataacctggggtatagtcaactt

SEQ ID NO: 1699 - DNA, 101 bp, Homo sapiens
gagactccagtgaggaggatgctaagacttcaataacatacaaataaacaragtatacagagcaacaacctggatctgttttgaatttttttaagtgttta

SEQ ID NO: 1700 - DNA, 101 bp, Homo sapiens
ttaagttttgatttctgaataatgaaactttcttcccttttatgggctgayccctcttctacatgctgtttacttatcatgactttctaggagtgtgggct

SEQ ID NO: 1701 - DNA, 101 bp, Homo sapiens
ttgtgatgaaaaaaagtgctaggaaaggagtcttgctgatagcccgaaacsatcttataaaaatgtcctcaggtccatctgcagtgacaacctacttgagg

SEQ ID NO: 1702 - DNA, 101 bp, Homo sapiens
tacatttatacttctactcagtagtggataggatttcccattgttcctaayttaactaaatctcagtacttttttcttcgtattaatccattttggcagct

SEQ ID NO: 1703 - DNA, 101 bp, Homo sapiens
aggttctgggacaagaaacagttgaaaaaagctttaaagatgaagtaccaytttatagttagcctagaataggcaggaggattttgctttgagcagcacca

SEQ ID NO: 1704 - DNA, 101 bp, Homo sapiens
ctgcctggaaagccatgttcattccaggtctacttctctgggtgatcattygagaaagaccagggagttgtaacccagtgaggttgaccagtgtcaaactc

SEQ ID NO: 1705 - DNA, 101 bp, Homo sapiens
tttcacaattaaaaataagttagtcacattggaggtgagactgatcatctrttttacagaaaatattgttaacatttatgttacaggatgaaaacatttac

SEQ ID NO: 1706 - DNA, 101 bp, Homo sapiens
gcagtgaatagaaatgaatattgtttaattcatttaacaggtggacttaakagtatcttataaaatttgatgaaagttttatttggagagcttggataata

SEQ ID NO: 1707 - DNA, 101 bp, Homo sapiens
agactgactggaagggatgtgaagaaattttcccaagtgaaatgttgtatrtcttgatgaatgtgttggttatacaggttaatttaacaaaactcaataaa

SEQ ID NO: 1708 - DNA, 101 bp, Homo sapiens
gggggaaagcatttcagtcccgatgtgggagagaggttgatatttgagcaytagaaagaaggcctgtgtaacaggaagtgaatgagcaaagggagagaaac

SEQ ID NO: 1709 - DNA, 101 bp, Homo sapiens
agctttttctcacatagcatagtgactaagtatacaggcttagcaatgcayattaaagttcaaattctaggtctaccgttaagttgtataaatgtagacaa

SEQ ID NO: 1710 - DNA, 101 bp, Homo sapiens
ctagacagagaccaaatatggagattggtcaaagataggtaatgggtatastaacagccacttcacctaaaaccagttttcctaaagatcacttctccaaa

SEQ ID NO: 1711 - DNA, 101 bp, Homo sapiens
agaggaccaggtaacacctgcacagtggattgcattatagacgaagggcaytgagtttaaggaattccatctattatgaagattgggcaaccctgcccaac

SEQ ID NO: 1712 - DNA, 101 bp, Homo sapiens
taatgatcttctcatttcaaatattaattacttcattttttaaggatagtktgtgagaaatacagagatctttctgatcacagaatctgtctttaggtctt

SEQ ID NO: 1713 - DNA, 101 bp, Homo sapiens
gccctctaggattttataatccattcaacagatatgaatcattgcattccrttgttagctgggaaatactaaatgtcaaatgattattaaagctatgtact

SEQ ID NO: 1714 - DNA, 101 bp, Homo sapiens
agaatggcaggtgtgttcataagtggcccacttacctaaacaacttacttwatctgtttacattcttcaagaatttcagaccattgtatgcagcaggaata

SEQ ID NO: 1715 - DNA, 101 bp, Homo sapiens
caaggatctgcaggtactttttggatccaaattaaggaaagatgagtggaraatatatgtaatgtgagtttagggagatgacatgtatacagttcccggta

SEQ ID NO: 1716 - DNA, 101 bp, Homo sapiens
gctgctacctaaataattgtcaacctatataaaagtgtgaaacacctggastatagagccacttgcttaagtgtattttacactgtatatttaatacattt

SEQ ID NO: 1717 - DNA, 101 bp, Homo sapiens
gccaattctgatccctgccaaggtttcattgattgttctattaatacaccygaggaaaaaaatgaagaataaatcaagcaatccaggaccaacttagtcat

SEQ ID NO: 1718 - DNA, 101 bp, Homo sapiens
caataacccaccacagtttaatgtctgatttaatgattccttaaacaatayttctaatgtgcattacatatggtccattcattgtcttacacaattctgca

SEQ ID NO: 1719 - DNA, 101 bp, Homo sapiens
gttgtcctttaaattcttctaagcacagtcttttagtgaagtcctcgtaarttctaccaggaaacaaattggtaacattttatgtttatatacattttgta

SEQ ID NO: 1720 - DNA, 101 bp, Homo sapiens
gcctctgtaagtgaaggacttgctgattggtgaattactctaatgtgggcmggtgaaccaggtacaagtaatcccctctcaatgaaaggacagctgcattt

SEQ ID NO: 1721 - DNA, 101 bp, Homo sapiens
atatatattttgtttttctagatatgaatttgctgacatttactgactaaragctttacctatccccaaggagggattctgaccaaggcagcccctagcag

SEQ ID NO: 1722 - DNA, 101 bp, Homo sapiens
tttaaaacgcttctacaaattatcagtgctacttgttcctctaaggataarcggatgataggatttcagagctggaaagagccttaagataatctagtaac

SEQ ID NO: 1723 - DNA, 101 bp, Homo sapiens
tttgcttttatatttcaataaagttgcagaatttatctgttaagtgttcawttagagttcattaaaattagattctgtgtctcaacacaatctacctcact

SEQ ID NO: 1724 - DNA, 101 bp, Homo sapiens
ggtctgattcctttactccctaggctgggagtacaaggctatctttggaarggtaattcttgactttggcatagagttgtgaaaagaacggttccccaatg

SEQ ID NO: 1725 - DNA, 101 bp, Homo sapiens
gcatgctgatatggcttggggggatggtgttctgagaaatgtcttgagcaygaggagtaccaagagaagtagacagtagcttcatcctgcaggccttgcag

SEQ ID NO: 1726 - DNA, 101 bp, Homo sapiens
aactttgtgatataattcaatgataatttaagtgctaatcagcatggtttktcaaaataatagaagcttcctttgatggaagatgaattttgaaaacgatt

SEQ ID NO: 1727 - DNA, 101 bp, Homo sapiens
tgaataatgaattttaataacagtttcttaatagtgacagggatgcttttycgtaattttattttggtcacctggattatacactttcagtgttaaagccc

SEQ ID NO: 1728 - DNA, 101 bp, Homo sapiens
cccagcttctcaggtgagccatgtttaagcctcttacaattcgtgcataamcgaaaggagatgcagatttgttctagacttgaaaaagaagttagaaacat

SEQ ID NO: 1729 - DNA, 101 bp, Homo sapiens
aatttctagatattttattttttttctcttttttgctattatcatattttytagttactgatggggtaaatttgtgctatagccaactaaatttctaatct

SEQ ID NO: 1730 - DNA, 101 bp, Homo sapiens
gaaaaaaaaaaaaagaatgtgattcaaagtgaatgtgaacaaacgatcgcrtggcttgaatgctttagcacagaagtacttgggtcaccactgtcttttca

SEQ ID NO: 1731 - DNA, 101 bp, Homo sapiens
gatcttaatatttagcaaatatattatgcattaaatagaatggaatttgaraagtagagtctagagtctatagatgtggttcagaaactggaaaatatttc

SEQ ID NO: 1732 - DNA, 101 bp, Homo sapiens
agttcatgataaattttgtgttgttcacctctctatccctaatatctggaraattacctagtatatagtaaatgctcaataactatttgtttagtaaattg

SEQ ID NO: 1733 - DNA, 101 bp, Homo sapiens
acttgaggtcaggagttcgagaccagcctggccaacgtggcaaaagctcamctctactaaaaatacaaaaaatagccgggcgtggtggcacatgcctatag

SEQ ID NO: 1734 - DNA, 101 bp, Homo sapiens
ctctgcaaatgacctgtcaggttcttctagttttatctgacctataactgsgtacataacatggcctcaagcattctggctcttcttgtcctcacataaca

SEQ ID NO: 1735 - DNA, 101 bp, Homo sapiens
aaaaatatacagatggaaaataatgataataatgtatgttgtcctttcaasaatgttttcagtgaagaatatttctaaataatacaagaaacaatacactt

SEQ ID NO: 1736 - DNA, 101 bp, Homo sapiens
cttccttgtacattatgcttaattaatagcaactactggtagttactgccyaaacaccattctatttcttgcctctaaattgttcgttcccactacctagc

SEQ ID NO: 1737 - DNA, 101 bp, Homo sapiens
aagtcggtcagacccctaaggttgcatactttcttttttcctccataaagygcatttacacaaggaaggcaatcaatgaaatttactttcagattggttat

SEQ ID NO: 1738 - DNA, 101 bp, Homo sapiens
ttcatacgatctcaagatataacccatgggaatgtcaagggtctacagagwtaccatacacattttatagatgagaaaaataaagttcagagaaggtgact

SEQ ID NO: 1739 - DNA, 101 bp, Homo sapiens
ggaatcaagcattggttataaactattttaaacaattttaatattagcggyttaatgtgaaagtattgatatttcattaattttttgttttacttgtgtta

SEQ ID NO: 1740 - DNA, 101 bp, Homo sapiens
caggacatccagttctcattacagttcatggctgttcttaaaaatctcatrgtacgctttggaggggaaacctgcatgtggcgcgcacccctaaggccaga

SEQ ID NO: 1741 - DNA, 101 bp, Homo sapiens
aatagaaattatcggatctgaagaactaaagtgttgttatatatacagaawactgaaatgaacaagagttcagtgacctctgaaaaaatatgggacacatt

SEQ ID NO: 1742 - DNA, 101 bp, Homo sapiens
gatggtttgcatgtggcatgtgcgggaaacggaggaatcaaggatgtcatratgtcatgtggatgtaagctttttccagtccactgaaaaagccagatgtg

SEQ ID NO: 1743 - DNA, 101 bp, Homo sapiens
tgagtttgatactaaaggctttgcttctcagctgtgtgttattaaggaagyccctgatccgtcgtcaatcttacttgcaaaacaagaataaatacatctgc

SEQ ID NO: 1744 - DNA, 101 bp, Homo sapiens
cacgctatgatttcacctcactgtatccaaattcttcaataaaatgcctasaagtatgtttggcttcagtgaaataaactggttaagtaacgtaaagaatt

SEQ ID NO: 1745 - DNA, 101 bp, Homo sapiens
ggaaaattataattgtttctgttggtacccttaagcttgtggtgcaaaaayggcctctcattaaatatcaattcaagattatttctttaagctccataata

SEQ ID NO: 1746 - DNA, 101 bp, Homo sapiens
aacttaatcttaggtatcaactgtactaaatgtattctttgactatcatamctataatactttattatatttaaactttataaactcaattattaaatgct

SEQ ID NO: 1747 - DNA, 101 bp, Homo sapiens
atgtaaacatgtgtctttacttcctaaagaaaatactatcagcttaaaatrtctacaaagtcccaattaaaaagatattcccttaatatacaatgttaaat

SEQ ID NO: 1748 - DNA, 101 bp, Homo sapiens
agaggttacagggaatatacagcttatcagaggagagaaaagttgaatgtytttccacaacctcagctcttcaggcaaaacactgcatgtaacgtgaatcc

SEQ ID NO: 1749 - DNA, 101 bp, Homo sapiens
gctactttatggataatagtctgtgagtgataactgttttagcaggacatrgttggaatgatcaaggtgagagatgatggtgggagaagtggagttgctga

SEQ ID NO: 1750 - DNA, 101 bp, Homo sapiens
atcgccttgcatggacaactaatttgaaaatgatgtcaagttcaatctaaytgttacactgagttaaatgtagaaaggatcatatggaacacttgttcatc

SEQ ID NO: 1751 - DNA, 101 bp, Homo sapiens
ttacaatgttcatggtgattagtggtcttcagagcttcagtattattacaktctttcacaaaagtactgtggcaataaggtatcaagaattgtgagtgaga

SEQ ID NO: 1752 - DNA, 101 bp, Homo sapiens
ctgccatctatctttaataactttttcactttctgtcttttgtaggaaggycaaacccaatttataaaatatgtactgccacaattttgtagtttgttttt

SEQ ID NO: 1753 - DNA, 101 bp, Homo sapiens
tctcaatagctattgtcttggagaatttgcctttgtctggaagctaagctrcagtttatttttccactgctacaattgacattgcctctgtctaatcactc

SEQ ID NO: 1754 - DNA, 101 bp, Homo sapiens
gaagtgggtgtgatctctgctctccttagaaacatagtcagctggtgttayttttggttttaccacttaacatgccaatctccctgaacgtttaaaatggt

SEQ ID NO: 1755 - DNA, 101 bp, Homo sapiens
ttagaaacatagtcagctggtgttatttttggttttaccacttaacatgcyaatctccctgaacgtttaaaatggtttgttctgtagcaaggaacttccag

SEQ ID NO: 1756 - DNA, 101 bp, Homo sapiens
aaagaataaatgtatatacagatagcatgtatgcttatctaaccttacatkcccatgctacaatatggaaagaaatggagttcctaacctccaggggaacc

SEQ ID NO: 1757 - DNA, 101 bp, Homo sapiens
ggttaaagttccaagttccaattccaagttattatatctttaagaaatatyatatgacaatgtgccaaaccaaagtgggaaatattatgaactggttgttt

SEQ ID NO: 1758 - DNA, 101 bp, Homo sapiens
ctaaaactagagactgatgtcagacaatatttgaaagtaaatactgagatytggtcatattgtagaaatgtatgcctcatacttacaggctgagcatctac

SEQ ID NO: 1759 - DNA, 101 bp, Homo sapiens
tttctaagttttttttatgtttattgcttttctaggttttggaaatgtagyggagaagaaaatctctatattattcatggagtttacaatctaggcagtag

SEQ ID NO: 1760 - DNA, 101 bp, Homo sapiens
caggtttcataagggtggtttaccctacaagctctgttatctaatgggtaygaaaaatatgttgatcttcagtttgttctaatattagtttttgtaatgat

SEQ ID NO: 1761 - DNA, 101 bp, Homo sapiens
tagtagctttctgaaggatgacagatgggtaagaaaagacactgtgagaaytttgggtccctgttataatttcataaaatttttatatctgaaggttgtgt

SEQ ID NO: 1762 - DNA, 101 bp, Homo sapiens
ctacctcctcactaaagtaaatgtctccagaaagggactcacacttttccrttatttctcagtaagcttcttggtatattaagagtgtttgtgtcaaattg

SEQ ID NO: 1763 - DNA, 101 bp, Homo sapiens
ttggaaaactattgaaattcatgaaagatttctcaggtttacttttgtgascttagcacatgtagaacatttacaaagctttaatgtccatatctgaacat

SEQ ID NO: 1764 - DNA, 101 bp, Homo sapiens
aaattactgaagtacgtgcagctctgagctgtccattggtgagcttcctakatatgatttcaatgctccggccctttgttcctggagcaggagatgagagc

SEQ ID NO: 1765 - DNA, 101 bp, Homo sapiens
gttctgggattgagccaggtagattgaatagaggcaaattcttctcttgawtgcacgttctcatgttgcaccagagagcggaaactgatatgccaacattt

SEQ ID NO: 1766 - DNA, 101 bp, Homo sapiens
gcctagttgtcgtttgaataatagagatttacaggtcaaaaaatagatgargttggacgcatggttctgggattgagccaggtagattgaatagaggcaaa

SEQ ID NO: 1767 - DNA, 101 bp, Homo sapiens
aattgagaactagaataaaaatatgaggagatctgatgttctaaactgcawtgtgtccacaaaaaccacctgtggaaatgaactcaaggttgacctcacag

SEQ ID NO: 1768 - DNA, 101 bp, Homo sapiens
tcctgaatttgatcatttttactgtgtttatgtaaaagaacttcgtcattyctgaggacaggtggaagtttttaaagatgaagggaaatgacatctgaaac

SEQ ID NO: 1769 - DNA, 101 bp, Homo sapiens
aacaaaggatcattggcctctagaacttaactcctaaaatgtaagctcggratagctcagatgttcttacagaaatagacaggatggatattttttacaat

SEQ ID NO: 1770 - DNA, 101 bp, Homo sapiens
aacattatcttatctttcacagggggcatctgtggctgaatacaccatcaytgtgggtgacatggaaaagatacatgagactcaaagaaggactagaaaag

SEQ ID NO: 1771 - DNA, 101 bp, Homo sapiens
acgtgatattgaacatcaatgtaatttttttccttttctatcccaacaacratacatacaagtgaaacaacttagaatatatatatacaatatgggtacag

SEQ ID NO: 1772 - DNA, 101 bp, Homo sapiens
agttcattgtgtttaaaaatatgtccattagcttgttaaattattgattaygcttttagttctcataaaatgtgaagatagatggaatatagggaaataca

SEQ ID NO: 1773 - DNA, 101 bp, Homo sapiens
ttactatgtgtaaataaaccttaaaattcattttattcactattcagtcarttcagtagagattattatattttcaaattaaccattatccaattaatttt

SEQ ID NO: 1774 - DNA, 101 bp, Homo sapiens
tgatctttttgtagacaaaagccatgcctccaatcaacttggacttaaagktatctagatccagctcttctgaagggaccatggtgtatttatttttcaca

SEQ ID NO: 1775 - DNA, 101 bp, Homo sapiens
agtttaataatattaggggactaaatagttggggggaatagatgagttaasaattcctctgcttgaaatagtggctatgaagtcataaactctatttaagt

SEQ ID NO: 1776 - DNA, 101 bp, Homo sapiens
aggtaacctcacaaaaggggacagattttcttgaaagaacactgctccaayggactgattttgattatcacagcaccttggtgccagcatgcattgcagtg

SEQ ID NO: 1777 - DNA, 101 bp, Homo sapiens
tgagtaagcaagaaagtaaacattggcattgagtatacatttagaagtgaygtcccaggatttaagacatctgtagcctgaaacgagaaagtaaaaataag

SEQ ID NO: 1778 - DNA, 87 bp, Homo sapiens
atagaaatatctgttcatcattatgtctgttaattagttttgctgttgatrttaagtatgcatacatttcttatattattcagtata

SEQ ID NO: 1779 - DNA, 101 bp, Homo sapiens
tagctgattgagtgtgcagcctattatgacacttaaggattttccatagtstctctttaatagatttgtgtttttatgagaacaatttaaatgtcagcatt

SEQ ID NO: 1780 - DNA, 101 bp, Homo sapiens
cagatctgcacacaggattcttagtagtaaatgtagaaaacataaaaagtrgttaagatcaaggactcaggcaccagattatctgtttgaatcctcacctt

SEQ ID NO: 1781 - DNA, 101 bp, Homo sapiens
aacttggtataagttttttgttaatgtatacattatagcaaattcctcctygagtagcagtaacagtttatcagaaagaaatgagatcaagatgagtaaga

SEQ ID NO: 1782 - DNA, 101 bp, Homo sapiens
atggaatattaaagattaataaaactagtaggcaaatgtaaatatgtatawctgtaagcatgtgtatatgtatatatgttttaaaatcatgaaaggccact

SEQ ID NO: 1783 - DNA, 101 bp, Homo sapiens
ccattggcaatggtatgattgaagttgctttgccatccaaatacaagtacraggatatacacttagggtaataacatgattgaatatcattaacattatac

SEQ ID NO: 1784 - DNA, 101 bp, Homo sapiens
caaaatgaaaatgcatttttcattttcacagtgtaagagaagttatagaartctacagtaaatagagttaattcctttcttagaaacttttgccaaattga

SEQ ID NO: 1785 - DNA, 101 bp, Homo sapiens
tataacttctcttacactgtgaaaatgaaaaatgcattttcattttgagasgtcaatgtagtagtctttaagcatcataaaaactctaactgaaattaagt

SEQ ID NO: 1786 - DNA, 101 bp, Homo sapiens
ttcctttgtgcgttcattccttctataatttttattttattctggtattckttccatgtcttcctaaaatatatgattaactaatgaagtgtcactttttt

SEQ ID NO: 1787 - DNA, 101 bp, Homo sapiens
cctgaatttcaagtgtatcatattcttagctttcttgttacttgtatcacrtaagaaagcaaccctaaacaataaattgcttagtatctagatgttttaaa

SEQ ID NO: 1788 - DNA, 101 bp, Homo sapiens
aaaataaactaagtagcttattgtgaaaagagaagctttttatatagattrggctattgaaaatgtacccacagtcttctggggaagacacataaaccagt

SEQ ID NO: 1789 - DNA, 101 bp, Homo sapiens
aaaaccaaggcctgttagtaaaaagataaagaaatagaaaagatagcgtawtacatgccactgaaaaagtttcacattcaatcacatttctggtgtattgg

SEQ ID NO: 1790 - DNA, 101 bp, Homo sapiens
tgttaaaataaagaagcacagggctatgaaaatataaggggttggatctartgataagtgaggtaaaatatgtttgagtaaaattaagtaagaaaagttaa

SEQ ID NO: 1791 - DNA, 101 bp, Homo sapiens
aaggtaagaatggtcttcaccaaactgtttttaaagtcaatgttgagttgrtaaattatgttgctatcctagtaattaaacttataaccagtctccttgat

SEQ ID NO: 1792 - DNA, 101 bp, Homo sapiens
acaccaatacattttaggaatgtataattttccttaccattctctaacaartcttcaacataatatatttccctaagtataaattctgctattcctatgtg

SEQ ID NO: 1793 - DNA, 101 bp, Homo sapiens
agttgtaggatataggtttttaaaagataggtgaaaagcaaatacagactrtggccaccaaatcaatagacctttaaaaaccaattagttcttcaaatata

SEQ ID NO: 1794 - DNA, 101 bp, Homo sapiens
atataatcaatggaatagatatggatggtaatgaatgaaatagacgtagaktgtgagggaacaaaatggatacagaggataaagggaatagagtcgtaaag

SEQ ID NO: 1795 - DNA, 101 bp, Homo sapiens
ttaaagttttaacaaggaagaaaccagagaaagggtcccatatgaagcagraaacagtcttctttgatggcattaacaagagcacttggtgcactttttga

SEQ ID NO: 1796 - DNA, 101 bp, Homo sapiens
tctttcaaaaatggctaaaatttataaaaccacacaggctaaggataaagscctcattttgctgttagttgattaaaagtgattgggattataaaatagta

SEQ ID NO: 1797 - DNA, 101 bp, Homo sapiens
agtgctgaagttttttgaccataatttagccaaaaagttggatcttaattkgttcaagctatttattgatggtctgagatttagttattttagtttgataa

SEQ ID NO: 1798 - DNA, 101 bp, Homo sapiens
ggtttagactatactatctttaagaattgctttgttttgtcaatgcacatrtattcactttttaacattctgaaatttggactaatcttacaatcatttcc

SEQ ID NO: 1799 - DNA, 101 bp, Homo sapiens
atgattcactttattttttctgtccataatagattttatatttgcatacaytttaatttgaggaataaattgaaaatggaataaaatattgaaatatattg

SEQ ID NO: 1800 - DNA, 101 bp, Homo sapiens
tcagcttcgattattttttagcttcaattattatgagccttttggcttatkcgcctgagagtgtacggcacaatttgtgaacacaatttgtggactatttc

SEQ ID NO: 1801 - DNA, 101 bp, Homo sapiens
tatcaaacatcaagacacctgacttctgcctgagcaacagagcactgttgrgtttctagaattgctgttctccaagtctatgtaggcagagttagatggac

SEQ ID NO: 1802 - DNA, 101 bp, Homo sapiens
aatttaatgcattcttcgtatcactttatacttatttgttcttgttctctygaaagggtcctactatatctaaaaatattttgaattgttttccctaactt

SEQ ID NO: 1803 - DNA, 101 bp, Homo sapiens
ttccactgaatgctttcttcaagagcccactgttatatattctgagaagtraaatgcacctttctcacattcattaatgtctagaactccaaaggggataa

SEQ ID NO: 1804 - DNA, 101 bp, Homo sapiens
tactccttttaaggagtattaggtaaacttacctaacttgagctaaacaargaagataagcgctgaccaggtggagcctgtgattttgcaagccaaacttt

SEQ ID NO: 1805 - DNA, 101 bp, Homo sapiens
caggcctctagtggtaggacatagccagagctgagagtggtagatggaacyattcttccaaagcatcatttccccaagagagagtgcacagcttctgctct

SEQ ID NO: 1806 - DNA, 101 bp, Homo sapiens
ccactcagaaaattctttcaactcacacgcctcatgctatgttccgtaaayacgttctcagagtaacactgaataaaatgattaagagccagtccactata

SEQ ID NO: 1807 - DNA, 101 bp, Homo sapiens
cagtaaaagagacttggatttccttcagtttaatcacatcttttatattgygtgctatccagcattttatagtttctaatattttatttctgtattttatt

SEQ ID NO: 1808 - DNA, 101 bp, Homo sapiens
tcagacaaggtttttttcaaacggaaagaaaaggaggatcagaggtcttaygaatcagaaagctgtccgatactgggctgagcttcagggctcagaatgtt

SEQ ID NO: 1809 - DNA, 101 bp, Homo sapiens
agactatttgtttagtgttgcaaattcccatcatgtcagaagtcacccaawgtacggaatctatacttttagagatagaagtgctacatctcccctttctc

SEQ ID NO: 1810 - DNA, 101 bp, Homo sapiens
ataagtttcagactactctagactatttgtttagtgttgcaaattcccatsatgtcagaagtcacccaatgtacggaatctatacttttagagatagaagt

SEQ ID NO: 1811 - DNA, 101 bp, Homo sapiens
agtcacacccaagataaatgtgcatttgctcagttgacatcagttttatgyacaaggagagtctggtttacttagctcttcattcccctggctctgggcaa

SEQ ID NO: 1812 - DNA, 101 bp, Homo sapiens
tgctgacaatcttaatgctctttcttctactgctggtaaatctgtttactyctcaggcttcctatatcagccatatcatctccattgttagcagatggcgt

SEQ ID NO: 1813 - DNA, 101 bp, Homo sapiens
atcatgtgtttgcatcagatgctgattagctatgactgtattgttaccatsaaacattatgaacagggaaacagcacagaaggaattaacaaattctctta

SEQ ID NO: 1814 - DNA, 101 bp, Homo sapiens
aggtgggcatctggaggaaagtattccaggtagtggggccagtaagtccayaggccatagggaatgtgtctgctttgttcagagaccatgctgagaaaccc

SEQ ID NO: 1815 - DNA, 101 bp, Homo sapiens
attcacattagaaactatcaatgaatgaaactgtatgtagcaacagaaatraggctaaacattgcagggatggagtcttgatttcataggggtcagctcgc

SEQ ID NO: 1816 - DNA, 101 bp, Homo sapiens
tggtaatcaatttctgaattgttttctacttccccctcaacccttacatcsaattagttgtcaagctttacctctccacgtactctcccaaatctacatat

SEQ ID NO: 1817 - DNA, 101 bp, Homo sapiens
ctaaggtctatttaatttctagacaatgctgcattctcttttatcattcayctaaagacccactcattttattaaagagatgtaaattttcccaaaataag

SEQ ID NO: 1818 - DNA, 101 bp, Homo sapiens
tattttaaagataaatggagtggctgggagggattctcatttttaaggttstaggtctaagcaagcctgagaaaaggggacccaatacccaaagattctga

SEQ ID NO: 1819 - DNA, 101 bp, Homo sapiens
tcaaatagcaacagataaatcaagttgccatgtaattaactaaaaattacrtaagcatccaatacttacatttagcaaaatcttgtttttaattaaccacc

SEQ ID NO: 1820 - DNA, 101 bp, Homo sapiens
atgtactaagctctgtaaattaacaatgacaaactaattatgatggtagaygcattgccctgacaaaggttattctggcactctgtaaatctgtagttaat

SEQ ID NO: 1821 - DNA, 101 bp, Homo sapiens
aaggttctttagaagtggaaagtcttgagatcggcctagaagaacaacatkaaatgggatgacaaacataattgtggtgttgcatatgccctaataggggg

SEQ ID NO: 1822 - DNA, 101 bp, Homo sapiens
ttggcataatgaacaaaagcaggactccttcagcagaagtatgaagtgaarttgatggcaggcaggcaatggagtaagttgttctcagaaaaacaacagca

SEQ ID NO: 1823 - DNA, 101 bp, Homo sapiens
ctaccaggctttcttcctcacgaattatgttattaactccttccactaacratagcaattgaataaaacagatacataagcaaacggaatcaaatccaaaa

SEQ ID NO: 1824 - DNA, 101 bp, Homo sapiens
tgtggaaaccaacttttataaaagtaagtaaatacatagttctatgcactkattgaataatatcaataaatattcatttaccacttagaatatgcaaggca

SEQ ID NO: 1825 - DNA, 101 bp, Homo sapiens
aggacagtgaagttagattgtttaatcctgcatatcttaaagatctaacaytttctagctgttaaatatgtttatcattatactagtaatgtacgtgcacc

SEQ ID NO: 1826 - DNA, 101 bp, Homo sapiens
agagataatgtgttttcaaagcttacagagtccaaatcgatagctaaacartgtctgtgggatttgaatccccctgtgatgttcactgtgtgttgccatat

SEQ ID NO: 1827 - DNA, 101 bp, Homo sapiens
cacaacacacacaatctgataactgagtcatctgcttattctaagtttacrttcagtgttacaaacagttcacaaaattttaacattgattttgaatttca

SEQ ID NO: 1828 - DNA, 101 bp, Homo sapiens
ttaatagttttactgtggattcacaagacaagtaaaagaggaaaatgctcrttaacaataaaagtgcaatctggcaggccttaattccaacacacccataa

SEQ ID NO: 1829 - DNA, 101 bp, Homo sapiens
tcattaacaataaaagtgcaatctggcaggccttaattccaacacacccayaaagtgatccaaggctgatgtgacaagaaagagcctattgttgataaatc

SEQ ID NO: 1830 - DNA, 101 bp, Homo sapiens
gttcccctccttgcttttaacaatggcaagctttctaggatgtctcgttgytttgtgcaattaaaaccaccacaaggaaggcttgctatgggtctgtatgt

SEQ ID NO: 1831 - DNA, 101 bp, Homo sapiens
atgcctcctggcacagaaaagcatccttcaggcttgagggaaggagagtcygaggaaaggagttagtacagatcccagagagaaaggtaataagccctgag

SEQ ID NO: 1832 - DNA, 101 bp, Homo sapiens
ttccacgtcccttcaaatgccgacttgtgagcggccttaaagttccttgtstgactcaactgtgataacctttacagcactgtaaaggtctctggctgttc

SEQ ID NO: 1833 - DNA, 101 bp, Homo sapiens
aggccactatgaaggcttattacaaggagtccgtgaggtggtagaatactstgatgtgattctggaagtcctggatgccagagacccattaggctgctgct

SEQ ID NO: 1834 - DNA, 101 bp, Homo sapiens
atatagtcaaaaccatagtatataaaatagaatactaaataatgttcaaayagtcaaatgaaagcaggaaaggggaaacataaatatggagcagctagcac

SEQ ID NO: 1835 - DNA, 101 bp, Homo sapiens
gttggaggaggcagaaaggccctgatccagttaagctttacttatcacatrtactcattaaaatagaagattaatgcctcagaagagaaataaaaattact

SEQ ID NO: 1836 - DNA, 101 bp, Homo sapiens
tgaggtataactgatgtacaataaactgcacatatttaaagtgtaaaaacrttatatgggccctgactaaccaagacaaaaattttgggaaagaagttggc

SEQ ID NO: 1837 - DNA, 101 bp, Homo sapiens
gtacagtatctactttttggacttttgttttttccattgatttatttaccyagtatcctaatgccagtatcatactgtctagataactatagttttaaagt

SEQ ID NO: 1838 - DNA, 101 bp, Homo sapiens
taggctgaactctaatattgtaacttttttctactgcctgtaaacctatamtaaaccatataatttgtcaaaaattggcaataaatgtaaccacttgttca

SEQ ID NO: 1839 - DNA, 101 bp, Homo sapiens
caaccagacataagaacaacacccagtttactttgtagcacttatcatatytcataatccttattatttatgtatttgtttatatggcttgactagaatat

SEQ ID NO: 1840 - DNA, 101 bp, Homo sapiens
ctggataccctaaaactctacgtccaccaaatctaagttccctgagcacaygagaagcattgttacactgtccattgaaaataccaatacggattttgagg

SEQ ID NO: 1841 - DNA, 101 bp, Homo sapiens
ctaggcagccttgatatcgagacctcataatcctgcctttcacagtaagawccagttgtatttccctgtggcttctccactcttgtgggggtatacgagct

SEQ ID NO: 1842 - DNA, 101 bp, Homo sapiens
taggagagatagaagaaatattgcaactgaagctgctagatggttatgatkatctgaataggtgtgatcttgactttagcgaattaacaggtaagcttctt

SEQ ID NO: 1843 - DNA, 101 bp, Homo sapiens
cctaaataataggagctctagaaagaggaaacagagaaaataaaggcaagkaaagtatacagagtaatttaagaggattcctcagagctgaaagccatgtt

SEQ ID NO: 1844 - DNA, 101 bp, Homo sapiens
atctacaaaaagaccatgattacattcagaggattgtatcaccttaatctsttagaggactgagaaagtttcaggagagttccaatctttgtgagggctag

SEQ ID NO: 1845 - DNA, 101 bp, Homo sapiens
taaatagataacctttttaatgataatcaatatgatttatgaaagaccctragcatacaaaattcatggaggatagaaaatgaatagatgaaagaacagcg

SEQ ID NO: 1846 - DNA, 101 bp, Homo sapiens
acaatgggcaggtcctctgggaacagtggacaatatcaataggtctaataygtatgtaactggagtctgagaaggagaagagaaaaaaattggtcagaaaa

SEQ ID NO: 1847 - DNA, 101 bp, Homo sapiens
ctgaagtccagagaactgctcagaattccatggttagctgatgactaaagmaggactagaattcaggcctcctatcctcagctcagggcattctccaatat

SEQ ID NO: 1848 - DNA, 101 bp, Homo sapiens
aaaattaaattttattccctgaattaggaaaaaacacactcaaaaagtaarccttaatacttagcataaacaagagactgggcagacttgaaggcagaata

SEQ ID NO: 1849 - DNA, 101 bp, Homo sapiens
cagactgaaaaaaaagaggggcggggagatttcagcatcctacttagaaartctcagtaggataaacccaaatcagtagttttttttcctaataagaatac

SEQ ID NO: 1850 - DNA, 101 bp, Homo sapiens
aagtcactgcaaaatatatcccgaagtagctaaaaaactagtatgtttgayggaataaattgagaatgaatcctactatgctgaaacaacaaatttggtgg

SEQ ID NO: 1851 - DNA, 101 bp, Homo sapiens
caattgcgcaaaccaccacaggactacaggctggtggcttaaaacaattamtactgaacagaaaaaaaaatgctaaagtctactgtattacttatggcact

SEQ ID NO: 1852 - DNA, 101 bp, Homo sapiens
aaaagaactagatatagaccttacacccttcacaaaaaaatcaaatagacsattgtaaaatgcaaactacaaaattcctagcagatagaagaggagaaaat

SEQ ID NO: 1853 - DNA, 101 bp, Homo sapiens
aatatataactgacacattgatggtagtataattttttatttctagctaamccaattttaagctattttgaagatattgagaatcttggtcattactgtat

SEQ ID NO: 1854 - DNA, 101 bp, Homo sapiens
aatctgccaaccttttgaagtggaaaaatattttaaagtattatcagtagygctataaagttataggctacttagtaaatattaaaacaatgggtcaaaat

SEQ ID NO: 1855 - DNA, 101 bp, Homo sapiens
aagctcttgatcaccagtcatctgagcaagctccctctaatctatgtattyactcccttttagccctttttttctcatccacatagatagctattttaaca

SEQ ID NO: 1856 - DNA, 101 bp, Homo sapiens
atttatcttcccctggacataatttattttagccatggcctaatttctttsaagacttagtcccaagtgtctgtgataatttgtaaaacttgatgaggtaa

SEQ ID NO: 1857 - DNA, 101 bp, Homo sapiens
accccatgaacttaacccccatattttccagtaactcatcaaatgtgacayagttctttatttgggatgaccaattttgttaaatttaatacaaagtgttc

SEQ ID NO: 1858 - DNA, 101 bp, Homo sapiens
taccgcagccactcctcaagcccgtgagctgcaagttacaaacgactttakattgtacaaagaaaaatcggggagggagctagaacacaaacaaaaaaatc

SEQ ID NO: 1859 - DNA, 101 bp, Homo sapiens
aatttaaaaacgttagctatgctacttacttttcccctctatgaactaatmtatatgctgtcataactcaatttggcacatctgttctatgccacaccatt

SEQ ID NO: 1860 - DNA, 101 bp, Homo sapiens
attttaattgtttgctaacagggcatctaaaatatttgagaatactgtcaytaaaatgtaaatgtttatcctataatattacttatcaaacacttgtttaa

SEQ ID NO: 1861 - DNA, 101 bp, Homo sapiens
gctcaacaaaattagtagcatcacagaactaagagcagttaacagaacaayaaaaaagtaatttatactattaacatgctaaataatctgcagaaattctc

SEQ ID NO: 1862 - DNA, 101 bp, Homo sapiens
attctacagtaactcttagaaacagggtccacattgatcatccacaagctrgagatgaggtcaataagaataaatgtcttgcccaaagttttacagctaat

SEQ ID NO: 1863 - DNA, 101 bp, Homo sapiens
atggtgtttcctctagacacatcagaaataggataggacaacattttaacygaaatgacatatgacaactcaaaactatgtatgtggccaactgggagcta

SEQ ID NO: 1864 - DNA, 101 bp, Homo sapiens
ggactcagatccagaccagatgtatttctataagtaattgtgtagaaaaargtctcagagacgttttaatagttgggttcatttatggcaatttaattatt

SEQ ID NO: 1865 - DNA, 101 bp, Homo sapiens
ggaaatgggctgctggtcttctatgaacatcacaggtttagaagatgataragcacagactagagtccttctccaagttatcagggcagcattcatccacc

SEQ ID NO: 1866 - DNA, 101 bp, Homo sapiens
gggaaagaacagtttcaccctccgtgagtaagtattttctctatcagtgastctgttcaagttttaaggcaggtaggtgcaaaacaaatcattgatcaggt

SEQ ID NO: 1867 - DNA, 101 bp, Homo sapiens
attcagtgtttacatttttagggccatttcatacattttgaagctaaaaartataatgtcttggtaatttcccatttcttcatttgctttctttgacttat

SEQ ID NO: 1868 - DNA, 101 bp, Homo sapiens
ttttagaaacatagacctgaaatttctaggtttcttgaggaagcaactgaytgatggctattttctccattcttggcagcccaaatgaatgactccaattt

SEQ ID NO: 1869 - DNA, 101 bp, Homo sapiens
ttctccattcttggcagcccaaatgaatgactccaatttatggaagatagraaagggcataaggagaaacataggagacatattcaaatattcatgtccat

SEQ ID NO: 1870 - DNA, 101 bp, Homo sapiens
cctgtgatgttaggagtaacatcctcgtagaacattatgaataatatcgcyggctgtttacatacatggggtacacatcctatgacattagaagtaacatc

SEQ ID NO: 1871 - DNA, 101 bp, Homo sapiens
cacttgtttaggtaatttaggttcctaaagcagctttgctatataactcarttgaaagcaatgtgctgacttggcctatccatgtaattgctctatttcct

SEQ ID NO: 1872 - DNA, 101 bp, Homo sapiens
gtatattattgtttcacatttcttttttctgatccagtttgcctacaatawctgttttagcatagtatacttgacatttgtttattttttacttgtcaaac

SEQ ID NO: 1873 - DNA, 101 bp, Homo sapiens
gagagaaagcatctacagattttatcctgctacatagaaatcaggactgartaccacagaatttttaaatgtcacaggaatctagagagattaattttcct

SEQ ID NO: 1874 - DNA, 101 bp, Homo sapiens
agtatttcgagctctccttcttagattttgctctttagcttctgatttaayatctctagctgatgaatttcaaatttttaaggcaaactaaggaaaatcaa

SEQ ID NO: 1875 - DNA, 101 bp, Homo sapiens
gtcttgtaactagtaagttcattgactacttttaatattttcactaattcrgtaaggtgatgagagagatatttcagtaaaatgaccttagtctcctgtca

SEQ ID NO: 1876 - DNA, 101 bp, Homo sapiens
catagtatccaactaattcatatataatctaatgtaattttaaattagtartcacatcatgaaatttcaaaatgtaatgacctggacctgtggaagagaaa

SEQ ID NO: 1877 - DNA, 101 bp, Homo sapiens
gctagacattggctagcctaaagaagcatatgtagctccatgtgggaggakatagcctggtcacagaaatctagttgctgctgataagtgtaataccttgg

SEQ ID NO: 1878 - DNA, 101 bp, Homo sapiens
ttaaacaattcacactctttttctctgtcctgatgcttagtctgcatcatraacccaaattcctccccagatcatctcacaagtacaaattgggcacatag

SEQ ID NO: 1879 - DNA, 101 bp, Homo sapiens
aaagacatagaggcataacctactagagaagcttgagaagcatataaaacratactgattatagggaattgatgagactattgtgaaaatatggaactgat

SEQ ID NO: 1880 - DNA, 101 bp, Homo sapiens
gaaattttcatggaactaacattgaagaaaaataaacataattgcataccraaatataataaaaatctatatactgtgttagaggaaagaatacacaaata

SEQ ID NO: 1881 - DNA, 101 bp, Homo sapiens
tctataagtaatgtaactggcaagcagccatgggtagtgccttaatagcarcataggcaatagctatcactggatgaagaggagtaggaaaaagaggaaga

SEQ ID NO: 1882 - DNA, 101 bp, Homo sapiens
ttaggaattccttattctgtctcacttgtaccacagtacattaccaagttkcaaaaggtatcatatacttttcaaaagagttatcaacataaaattaattt

SEQ ID NO: 1883 - DNA, 101 bp, Homo sapiens
ttccttaatgaatattttcctattggccatactgtgttttattcccaaagrttatgtatggttaagtcggcatggagcagggataggaaggcatgttggca

SEQ ID NO: 1884 - DNA, 101 bp, Homo sapiens
tgatttatttgatgtaggctgaagccttggtactagaatactttaaatacwctctaggcaattataatattcagctaggattggaaattattgccttaacc

SEQ ID NO: 1885 - DNA, 101 bp, Homo sapiens
tcagctccagcccctactcttagtccccaacacccctatgatttttcttcrattcactgagattaggacttgctgaggcccaagctgtgtacttggtctgg

SEQ ID NO: 1886 - DNA, 101 bp, Homo sapiens
aaccaaaaaagagcaaacctttattgggtcccttcatccatctatgttccrgaagactgttctatgtgggcatgaagtggatttggagatgaaatgtccaa

SEQ ID NO: 1887 - DNA, 101 bp, Homo sapiens
tgtcttgagaaaaatacaactcaaaatggtcatattactcagatgatgccrgatgtctgatcctaaagacatttgaatctttattcttggtggtcaagtca

SEQ ID NO: 1888 - DNA, 101 bp, Homo sapiens
ttgactctgtttgaatgggttagggataactcaacctggaccttgaagagygatgagtcttgttcatgagataggtaggaaacatactctaggtgggggca

SEQ ID NO: 1889 - DNA, 101 bp, Homo sapiens
tctaccaaactgcacatgtttatgtacaactgactgcagctgagcctgaaygtgcaaataggtcagtgtcactgcagaggtgacaatgagatgtccagggc

SEQ ID NO: 1890 - DNA, 101 bp, Homo sapiens
ttactaacctttcactcaatacaaaataatgacggactcctagttcgtttrtattcagctggggtaacatatttattcaggtgccagatgtagagtgtcaa

SEQ ID NO: 1891 - DNA, 101 bp, Homo sapiens
ttccactctctttgcgtcctcaaacaaagagacttcctattcacttagttyggttcccttgtgacctgaagtcatttcacctatagaagacaaatgacttc

SEQ ID NO: 1892 - DNA, 101 bp, Homo sapiens
gagtgcagaagtgacatatgactgatgttattgtttgcaaattattgtacygccagtgaaggtaactattaaagacaatcaaatatagccaagctgtatag

SEQ ID NO: 1893 - DNA, 101 bp, Homo sapiens
aaagaacattttattatgttaaccaaacctctactctgcaattaactctarttacacaagcaattaaattgggagtaagattattttgcagtttgaagcta

SEQ ID NO: 1894 - DNA, 101 bp, Homo sapiens
agcggttgactcataccaatcagaagctctaactggatgttgatgaagtcrtagaaccaggtactgattaaagagctaacgtttagatggtcataggctat

SEQ ID NO: 1895 - DNA, 101 bp, Homo sapiens
ttttacaacgtgactttcagggggaaataaggatgcagttcctagtgcccrtgccaactccatttcttattgtaaatttatatcctgccattcgtgtctat

SEQ ID NO: 1896 - DNA, 101 bp, Homo sapiens
cgcttatgtggttagatgtggccatgtgactgaattctagccaatgggatrtgaacagtcacaatgtgctccactcccaggcctggcccataacagccacc

SEQ ID NO: 1897 - DNA, 101 bp, Homo sapiens
atttttgaatgaataaatgaaatctaaacctcagagattaaaaacaggtaycaagaattaatcaggccaaatatttctaaaaggatgggaaaatcactggc

SEQ ID NO: 1898 - DNA, 101 bp, Homo sapiens
caaaagtgaaccagagtgcaaatgatttcaaaaccagtaaacagctcccgktatacaatatggtaagatgtctgccatgctgctctcttttttgaaggtgc

SEQ ID NO: 1899 - DNA, 101 bp, Homo sapiens
ggtataattctgagacatacatataaagtctagaaatagacctaaacagtmatgggtattcggcatctggtaaagctagcatttcaaactagtggcaaaga

SEQ ID NO: 1900 - DNA, 101 bp, Homo sapiens
ttcacccgggtgaccatttcctcactttgtgtccatcatccacttctcctycaaagaacttattcctaaaataaattacttttagttctacatgtttttaa

SEQ ID NO: 1901 - DNA, 101 bp, Homo sapiens
gtagcccagggtgattcagaagctccatgaagcagccatctttcctggatstctggaatgtacacatttgctgagatcacaaagatgaagctggcagaacc

SEQ ID NO: 1902 - DNA, 101 bp, Homo sapiens
attgcactttttggaattttttaagtgaaatagtgaaatcgaggagtaatmataaaacgtctacatatgggtgtttagagctgctgttttaatgatacctg

SEQ ID NO: 1903 - DNA, 101 bp, Homo sapiens
ttgcactgggcatttcagatgtggttttgcattcatttgtgtgattcctcyataagcggatgtctccacactgctcctgagggcaagaaccaggtctgcat

SEQ ID NO: 1904 - DNA, 101 bp, Homo sapiens
agaaaaataagagaaaaaatatactcactgggaagatgttttattgctaamgtgggttactaaggtccccactattgctcattttcttagaaggcttaaat

SEQ ID NO: 1905 - DNA, 101 bp, Homo sapiens
atatctgtataaatgtgtttcagaaggtcaaggcctgattaagctagtggyagagtatatcctaagaccttgaatagccaacagatggaattaagcagttt

SEQ ID NO: 1906 - DNA, 101 bp, Homo sapiens
taatgatatgctattctaagaagatttattgaataatatctaggtgtcaayttacttgttccttgtaacatcatctgtgctcttagaaaagtcagccaaga

SEQ ID NO: 1907 - DNA, 101 bp, Homo sapiens
tacttgaagaggctggtaataaataaggaccatatgctctctcttttaaamatgtacctgtctgaagcttgaacttaagcttcattagtattccatggatg

SEQ ID NO: 1908 - DNA, 101 bp, Homo sapiens
cctaagcattcaaaccgatgaggctactttgtacatagcaagtcttttttrcaagctgaacgcagtatgaattcatactcaatcatgcactgttcagccat

SEQ ID NO: 1909 - DNA, 101 bp, Homo sapiens
tctagggaacaaaacattatcaaagacagcaaaattaagggaaactgagtragattattaaaatagatcatattaatgccaaaatctcttgtacaaagaga

SEQ ID NO: 1910 - DNA, 101 bp, Homo sapiens
gagaccacttatatatttattcactgagcaaatattcattgttacctattmtgcacagctagagaatgttagctcaaagttttcaaaccatttttttaaaa

SEQ ID NO: 1911 - DNA, 101 bp, Homo sapiens
aaaattaaccaaaggatcttagaatccttcagattattttgagtcattcaytatacttaataattgcattcattgtattttactaaaactatgtgtatgaa

SEQ ID NO: 1912 - DNA, 101 bp, Homo sapiens
atcccagacattcactatcgggattcacaccctgttgtatcattgaaaaaygcgcagacttcagctggatgaggtgctcatgcctgcaatcccagcacttt

SEQ ID NO: 1913 - DNA, 101 bp, Homo sapiens
aaaggtatcgtttacactagaatatgggcgtgttcttttttggagaatatrataaaatcaccatgtacttgtataacatgccatttctgtacagagaaatc

SEQ ID NO: 1914 - DNA, 101 bp, Homo sapiens
tcacctgtggaacatttaatggcccttttatttgatattttggtacttatrtatgtctatcttctcagataagcttttcctctgacagaaaagattttaaa

SEQ ID NO: 1915 - DNA, 101 bp, Homo sapiens
tttgtatccacttcaaacgtaaactcctgtgactccttctcaaaacttacyacatacattttctctttaccctttcaggcccctgtccaagcagccaggcc

SEQ ID NO: 1916 - DNA, 101 bp, Homo sapiens
tcagaatttaaaataaatacaatgatgaggccaagttagattatatttgaytgtataccaacagtcataaataataattttagatttttttttgggtggag

SEQ ID NO: 1917 - DNA, 101 bp, Homo sapiens
gtgtacccttatttagctacttctaccagaataaaccaaatctcagttcartatagtaatagacctgaatatttaaatagagaaagagaaataagccctgc

SEQ ID NO: 1918 - DNA, 101 bp, Homo sapiens
ctggaataaggtgtaagttaaaatcgggctttttgattttcactgtagatrgagttcagaaatactgtcatagttaaaaaaaaaaacaaaatgtttcagct

SEQ ID NO: 1919 - DNA, 101 bp, Homo sapiens
gattttggagtgtcatacaaatgtttccaaattgactgtgaaagacaagcygagtgtgaataatatattctgttgtagtcttcaacaaaagttgctctcta

SEQ ID NO: 1920 - DNA, 101 bp, Homo sapiens
ctgtaaataccactgcattgttgggtctttgggtacagaattccaaaaaamtgtaggtaatgaaaatggtgtctctaatgagaaacaaaacctagttggaa

SEQ ID NO: 1921 - DNA, 101 bp, Homo sapiens
actggtatggaaattgagttaggataacagagcctgagttcccccatgagrtaacaagatgcttctgaatataagtcaaaattggagtatagattgtctca

SEQ ID NO: 1922 - DNA, 101 bp, Homo sapiens
aagaaaagtgtgatttccttttaagtatgtttctatctcctaaccttgtgrtcagaatgctggcaagagagttggcaggcttatttgcactatgttccaga

SEQ ID NO: 1923 - DNA, 101 bp, Homo sapiens
caactgctcatctaattttagttctgtattttcatatgtcttagcgtcctyttccttcacatccttacattcattcaatcacttatcaaatctttgtgact

SEQ ID NO: 1924 - DNA, 101 bp, Homo sapiens
cctcatctgaattaaaaataatactaaaaaaagcacaaaataaaagtttasatttggcataactttagtagtctctacaattgtggtcttcttataataaa

SEQ ID NO: 1925 - DNA, 101 bp, Homo sapiens
tataaatgggccaaaaccttaaaagcagtaacttactttgctggattttaytgttacatttacactttatactaacatgggtttatagtataaaagttttt

SEQ ID NO: 1926 - DNA, 101 bp, Homo sapiens
gtgagccaaaacgcaacaaacgtccaccacactgccttacggccctcgtamttttggtttgtttagaaaacttccttgcctatcccacacccttcaagata

SEQ ID NO: 1927 - DNA, 101 bp, Homo sapiens
aaatgttaaccaaaatttctgtaaacattgtcacagagaggccttcagcartttctggttaaacatgttaattgaacagagccatttaatttctgtctttc

SEQ ID NO: 1928 - DNA, 101 bp, Homo sapiens
gtccgttgtagcatggttggaaggtgacttactttaaccacaggacgagtraaatgatgtgtcactggacacttgagtaacctctacaagctctgtctctt

SEQ ID NO: 1929 - DNA, 101 bp, Homo sapiens
tggccagatgggaacagccgctctgaggacctttgcatttatctaaaaggytttatcaggaaagccatccagttgttttctaaccttgttcttatttaaat

SEQ ID NO: 1930 - DNA, 101 bp, Homo sapiens
acttcaaattttacgctgttatttcttacatgaaaaattgtctccaatccrctttatgtatactcatgttatcttcaattaaattgttaaaatttttaaaa

SEQ ID NO: 1931 - DNA, 101 bp, Homo sapiens
gcaataatcactaatagctagaaatgagttgccaagctctagggaaaacargctgcatgcaaatatgcctgaaggagctgataataccaggaatggggcca

SEQ ID NO: 1932 - DNA, 101 bp, Homo sapiens
ggaggagaaagaggtagcagggggtaagtagccaagggtagctcaaacaawcccctcgattctgaaggagaattaggattgaggtgaagaatgggggaaga

SEQ ID NO: 1933 - DNA, 101 bp, Homo sapiens
catccaaggtaacaagagtgaaagaagggatggccccactcatctgatacytgatgtgcaaatacatgctgccttgagttcatcattaattatcttatggt

SEQ ID NO: 1934 - DNA, 101 bp, Homo sapiens
ttttaagttcttggttaggctattgtttgttccaactgttatttatgaccrtcggcaaccatgatgttcaacaactgcctatgattctttttactcatttc

SEQ ID NO: 1935 - DNA, 101 bp, Homo sapiens
gaccaatgaaaatgttggaaattgtatctgcagctcagacaactgaaaaasgactaatctgcttatagatggagagctaacagaagtggagagacaaagac

SEQ ID NO: 1936 - DNA, 101 bp, Homo sapiens
tttccttctggctgtcacctggttgctccagtaggtcattcagatctccaygtcctactaagaaactcccctcatttatcccactaggaaacatccattac

SEQ ID NO: 1937 - DNA, 101 bp, Homo sapiens
gcccactttcaccacttctttcaacatagtactggaagtcctagcaagtgrtaatttcttaaaggttagatacaacctgaaaccctatcattgactatttg

SEQ ID NO: 1938 - DNA, 101 bp, Homo sapiens
tatgatcttcaggcactggaaaaaacgtctgcatgtaaaatacaggttggwaaagcatttgattagctgagttgagtgaatgagcttttcaaaggaaagtc

SEQ ID NO: 1939 - DNA, 101 bp, Homo sapiens
ttattgaattattataatattagtgcctatgttctctactctcaaaagtgmaaatgacattaataactgaatttataatattttctgctttgctaccttaa

SEQ ID NO: 1940 - DNA, 101 bp, Homo sapiens
ggccctccaaaggcctccctccactgtgaggacaggcacaatcagaatctygcgcccttcagagtctctacctcagtgacagtggaggtctttctacttct

SEQ ID NO: 1941 - DNA, 101 bp, Homo sapiens
caatttttgggagactgtggaagggataacttgaaatcttgaagaatgatytagggccttgttacccaaagtctgatccagggactagctacattaatagc

SEQ ID NO: 1942 - DNA, 101 bp, Homo sapiens
ctcactattttgtagttttatgtagttcaagatagctgattcctgtataarggtattaaaatgtctagtaaagaaactatgttctcacagggcagtgatgg

SEQ ID NO: 1943 - DNA, 101 bp, Homo sapiens
atcttttctaccacaaggcatctgggcggttcctgcccagtgctactaagrctctgctaggatatctcctccagccccaactgcagatcaacccaagcagt

SEQ ID NO: 1944 - DNA, 101 bp, Homo sapiens
gagcaaagacaattttaacttctttctaaatgttttacaaacactatgtaytattcctgtaagtttgtaaagcaattacattggaaagcaaacacatttgt

SEQ ID NO: 1945 - DNA, 101 bp, Homo sapiens
tctattttgtgaagaaaaatatatagcatatgcattatatagatcatgtgytttataaatacagtatcttctggcagattcagctaaatgtccaacaaata

SEQ ID NO: 1946 - DNA, 101 bp, Homo sapiens
gcaccacagtattttaattacaaagactttatattgcattttaatacctcrtagtgctatatattttaatatccaatagatctaactccctttccccaaaa

SEQ ID NO: 1947 - DNA, 101 bp, Homo sapiens
tttccacctctcatcccccaactcctgtgtcctaggcaggcctggctttcygaattcactttcactccagccagccattgcgattggcagcctgatctatg

SEQ ID NO: 1948 - DNA, 101 bp, Homo sapiens
taattaagggttttaaattaaaaataatttctttctcattacaaaaactayatgtgcttcttagacaaaaatcagaaaatatagaaaagcagaaagaagaa

SEQ ID NO: 1949 - DNA, 101 bp, Homo sapiens
gccccttgagaatggactacaactcccacaatgcattcgaggggcaccgtrttagggcgccacctttttcccggctgtgctgtacctacagcacccagaac

SEQ ID NO: 1950 - DNA, 101 bp, Homo sapiens
tctttgtacatgtttcaataaatacccagaggtagaattttaattctgtaygttatcatggggccttcagtataatggaatttcccttgtctacactgctc

SEQ ID NO: 1951 - DNA, 101 bp, Homo sapiens
ggcattaggtagatgcccaacaaatacatgtgtagcctaagtctggatagwttaatgtgttttcctccaagataacatattgtgatggaatagcagcttga

SEQ ID NO: 1952 - DNA, 101 bp, Homo sapiens
aaaggttaaagaaaatggaacagaagaaaaatttaaccttgaaggcatttrtatagactgacctaattttctttgaattcggggagtgggactgctctact

SEQ ID NO: 1953 - DNA, 101 bp, Homo sapiens
cctgatctttagaaatttcaggttttagaaatcaactttgtacaacaatgygtaaatccttagtataatgttcacctttctccattgcagagctatagtga

SEQ ID NO: 1954 - DNA, 95 bp, Homo sapiens
gtgtgtgtgggtgagtgtgtgcatgttttgtatacacctacattrcttgattcatgtacatacagttttctgggttcacctaatgtttcttgaag

SEQ ID NO: 1955 - DNA, 101 bp, Homo sapiens
tgggggaaaagaaaacctttctaagtggaagaacaaagaaagagaaacttyttgctcaataggtttaattcagataaatagttattgatttcttactgtat

SEQ ID NO: 1956 - DNA, 101 bp, Homo sapiens
tcctaattattcattatttattcagataattaaatgacgtaagaatagtargacaagaaaaataaagatgtgagtattcaaaaatagagggctgtctttat

SEQ ID NO: 1957 - DNA, 101 bp, Homo sapiens
gggagtttgaaatgtagggacaagcacacagacacataccacgcatcttcytaagctaaggaaattacactgagatcagaagtggctggagcagcaaatgt

SEQ ID NO: 1958 - DNA, 101 bp, Homo sapiens
tacatagtttctatagcatttaaacaggttaatacttttcagaaactaacktggaaaaaagcctatcttaggtagacactttcatatgttatctcacataa

SEQ ID NO: 1959 - DNA, 101 bp, Homo sapiens
ataaaataatgtcatctgtgaaatgaagctagttcattgtactaggtactrgagttttaattaacaaaaatggtttgtaaaaaccgagatatctgtttgtc

SEQ ID NO: 1960 - DNA, 101 bp, Homo sapiens
ccaactagtgacatgcaatctaaaggaatgtatgcaaattctgagccataygctttaacagggaaaatgcctgcgcttcacccagaataagaaggtggtac

SEQ ID NO: 1961 - DNA, 101 bp, Homo sapiens
aagaacatttttgtggaatgaataatatttcattggagttaagtctattcyttctttgattaggtttatttcttcataaggtcatctttgatacttaaact

SEQ ID NO: 1962 - DNA, 101 bp, Homo sapiens
atttaatgtttgtatgcagtatacaccaaaatgattggcccttgtgaatgrgtttattagttctgtgatttcttttatctcatttgaattcagtatataat

SEQ ID NO: 1963 - DNA, 101 bp, Homo sapiens
atctagttaaaattttaatgtatttttttgttgctgatcaagctcaaacaytctaggaccattttacaaaataacaacaaaatgccagataaagtggagag

SEQ ID NO: 1964 - DNA, 101 bp, Homo sapiens
atttgggaactttttaacctaatttgcaaaactaatttacagtttgaagamaatcaacgaactgctgtgaagcaaggagacgtggggatgatcccatttct

SEQ ID NO: 1965 - DNA, 101 bp, Homo sapiens
tttctgctactctcaaaaagaaacatctattggcattattgatcgatgacsaattctaaggtttctttttttctaattaacttatttcttcttttatcttt

SEQ ID NO: 1966 - DNA, 101 bp, Homo sapiens
acatcaccaaaaaacatatatgaagtatctctaaaatcaatcctggataaygagggatacagaacacagtgaagggagtaggtgctttgataagacctaga

SEQ ID NO: 1967 - DNA, 101 bp, Homo sapiens
tggagtgagaaaggtggggggcttggggacccgttgctaaaggggtgtgaratttctctgtggggtaataaaatgttcttaaattgtggtgatagctgaca

SEQ ID NO: 1968 - DNA, 101 bp, Homo sapiens
cctagatctgagatggtcaccaagttatatgacaccctgtgagtcttggcwtaatacagtcaactggtcaactgatcttacctgcttttgttgcagacgtt

SEQ ID NO: 1969 - DNA, 101 bp, Homo sapiens
tgctattgctggtcttacatggaattatataaaattaaactatctgctaartatgatgttaagcttttgctaagctttttgtcatatatactctataattt

SEQ ID NO: 1970 - DNA, 101 bp, Homo sapiens
atcagtaaggtaaaagttactatgtaatacaagaagcttattaatatcaawctaaaagcattaacattgctacctcaccaagccccgaaaaaaatcacatt

SEQ ID NO: 1971 - DNA, 101 bp, Homo sapiens
aaaatattttatggtactgagacataactccaagaaaagggagtgcctcgrttattcctttaacaaatgtatattgaacatttcttatatgataggcactg

SEQ ID NO: 1972 - DNA, 101 bp, Homo sapiens
agtcaatgggaattgctgatggatcatatgtaaaataagagttagcaggtrtataggtataactccaaagtttttagcctgagcaactgcaaggatggaat

SEQ ID NO: 1973 - DNA, 101 bp, Homo sapiens
agaccaagatattgcgagatggaagtgatggtaatggaaagaacaatgatraccttggaagagatactgtgaggaattaacaagaggtcaaatagaaataa

SEQ ID NO: 1974 - DNA, 101 bp, Homo sapiens
tctcttttcagtctcacataataagaacaccattcctagacaactagaacmactcatttcctaatacacacttcttaacatcaccctcttttcttgatgag

SEQ ID NO: 1975 - DNA, 101 bp, Homo sapiens
ttatcttagtcccaatataaacaaagttgtaattgcttcacttagtacctkagcacttgtgtagttatgaaaaacatcatttaatagcagcagtgaggaga

SEQ ID NO: 1976 - DNA, 101 bp, Homo sapiens
aactaaaaatatagtaactaccaaaaccaaattgatccaggaataaacatytatatggtacctccaatctggaactagtcaagatgtattaaattattaat

SEQ ID NO: 1977 - DNA, 101 bp, Homo sapiens
acttaaactataaacaagttacttcgggtccctaaatctgtaagaaaatcytggtgcttatcagttcaactccccaaactgaaacgaagaataaacactct

SEQ ID NO: 1978 - DNA, 101 bp, Homo sapiens
tatagtcattttgagctcatgataaatgaattacagatgaaaaataaatastttgatgacaatctttacaaaagtttatcttcaaagaataccaccagtca

SEQ ID NO: 1979 - DNA, 101 bp, Homo sapiens
tgggcctcactcaagcatgctcagtactctgtctctctctctccggttatrcagaaattctattaggattctgcaaagtaaaataaatatttcagtaaaaa

SEQ ID NO: 1980 - DNA, 101 bp, Homo sapiens
aatactctagacaactgtaacacaatgataagtatgtatgcatctaaacayagaaaggatactataaaaatacagattatcatcttctgggaccaccatcc

SEQ ID NO: 1981 - DNA, 101 bp, Homo sapiens
taggtgaggtactaattatggcagaaactcttaaactattcagtatctcastaaccacactatagtatatactgtatactggctgaataattagcaactca

SEQ ID NO: 1982 - DNA, 101 bp, Homo sapiens
tgattcagggatcagtacgatttaaactacacaaatgcaaagtaggaacgmaagattcttaaatgtggatagagtctccagtacaaggaatgcaacaaccc

SEQ ID NO: 1983 - DNA, 101 bp, Homo sapiens
tattggtgctggcagcaacaaaagagctggtgagttctgactggcgagtgycaatagttattaggtaggacttgtaatcctggagttacagttaggccctt

SEQ ID NO: 1984 - DNA, 101 bp, Homo sapiens
aataagtaaaagcacctagtaaaagcaaataatatgtgaaaaatgcccacrtgtagcaggcaattaattgatgtttattgaatcttacctaactcagtccc

SEQ ID NO: 1985 - DNA, 101 bp, Homo sapiens
tcttcattatactgttttgtctacttttctataagattgaaatttttcatrataagaaagctacaaaaagaagaattccattgtaaagggagggtttagct

SEQ ID NO: 1986 - DNA, 101 bp, Homo sapiens
acattaagtgttttgtaaaaatttatattaaacttgtttaatttggaggtratttactaataaagatattgagttggcagattacataagtcctttgtaca

SEQ ID NO: 1987 - DNA, 101 bp, Homo sapiens
gtattctttagggaataatgacaagaaaaaaaatggtctgtataaggttcmgtacagatgtaattttttccccttaattattttcaatccatggttggttg

SEQ ID NO: 1988 - DNA, 101 bp, Homo sapiens
agtttgggtatcattatcttgaccttttaataaagaacataggcttctcartagtcaaatgatttacccatggttatatgttatataaataataagagtta

SEQ ID NO: 1989 - DNA, 101 bp, Homo sapiens
cttctccaccaatacagccataagctttgttcaatatttccaacttaagayattcagctaatggttttcgggcaaggtcaggtcggtcagtctagaaacga

SEQ ID NO: 1990 - DNA, 101 bp, Homo sapiens
gaaaccctttcccaactattcttggtcttattgttttctcaatttctgtarcacttgtccttgaaccatataatttagccattaattacacactgtgccac

SEQ ID NO: 1991 - DNA, 101 bp, Homo sapiens
tacaatttcttcatgtttgtgattttgaggtatcatgaaggaatctgatcratgtatctttcacaaacgtcaatgtgagaatagccttttcctttcttttg

SEQ ID NO: 1992 - DNA, 101 bp, Homo sapiens
ttttcttataattagacatttcttttgtccattaatagcaagagcgtcttrtcaaggatcatggaagcagaactgattcaagattaaaaagatccgtaaaa

SEQ ID NO: 1993 - DNA, 101 bp, Homo sapiens
taaaatgaatctttgagtccttgctggccttatactaatacagtagtatamgatcatttctgtgtaagtaactgagagagtaatttaagagcgtatccttt

SEQ ID NO: 1994 - DNA, 101 bp, Homo sapiens
ggctgtgcaaagccaactttccaaatcaaactccattgccctaaaattatmctaatatccctgaaacaccttggttcgtggagtcagtgcagaatctaata

SEQ ID NO: 1995 - DNA, 101 bp, Homo sapiens
ttataagtatgacatgctgtcacccttatttatacatgaggtatggaggtragcgtgaataagaatcttgctcagagccaattagttgcagatccagcatt

SEQ ID NO: 1996 - DNA, 101 bp, Homo sapiens
cttctgaaaatataaagaacacatgagtcaccactattaatagtactgttktctaaagctttggtttcattaataatgtggctaaaaaaagaaattatgtc

SEQ ID NO: 1997 - DNA, 101 bp, Homo sapiens
gaccactaggaaaggtccagggtggcttatgtctcccaaactctttctgayaggacttgatcaaccaatgtttgttgaattaatcccctaagacaaaaaca

SEQ ID NO: 1998 - DNA, 101 bp, Homo sapiens
tattgcatgtaaaagagtaaaatggctatctttaagtaccaaatactccartagcagggtagcaacatttatttacactacagcttggtatgtatatgtgc

SEQ ID NO: 1999 - DNA, 101 bp, Homo sapiens
ttacaaaacaaactagcttttaaaaaaagtaagccattctgaaatttaacsatttaccacattttaaacacagttgctatgatgaacatatttgtaaattt

SEQ ID NO: 2000 - DNA, 101 bp, Homo sapiens
gttcatgagggagatttaaattcacacaccattttcctagactccttcacygtcttgacactttcctattattagctctctttttggagatattttgtgtt

SEQ ID NO: 2001 - DNA, 101 bp, Homo sapiens
accctagtctgaactgacaatactgggaagtggtgatataaaaggaattcrctactatcttgaactatgtgctaattataattggatctttgttatccaaa

SEQ ID NO: 2002 - DNA, 101 bp, Homo sapiens
agaaatctgaatttgtatcacttatccttatacagaaaaaccacaaaatcrcattaattttccagttttattacacaatataaatgtagttacctttcaaa

SEQ ID NO: 2003 - DNA, 101 bp, Homo sapiens
aatttttcttgaagagcaattaactatccttgaagttttcttaaaggctgmgtttgggttaatttctattaattaaaattaatatttaaaaaacatatctg

SEQ ID NO: 2004 - DNA, 101 bp, Homo sapiens
aaccaaaaactatacctcagtcaccattagcagcttttccttcaaaatacrtatctactggatggatggtttattggatagccagatggctatgtgtgata

SEQ ID NO: 2005 - DNA, 101 bp, Homo sapiens
atctcaaactgtaggtaaagaacatttgcagtttaacaatctaaacttgtrattaacaatctaaatttgtgagccagcatgcaatagttgaaacccagcta

SEQ ID NO: 2006 - DNA, 101 bp, Homo sapiens
atttaggatatattttccaattaggagttttgtttcatgtacttaagatayggttgttaacacctgtatttgtggaggtttttttctatttattttcatga

SEQ ID NO: 2007 - DNA, 101 bp, Homo sapiens
ccaaagcactaagaaagttccacagtcaacagaaacattggcccagagatsctaaactccgtatgttcctcaatcacatttctgatgagtgtgttttggta

SEQ ID NO: 2008 - DNA, 101 bp, Homo sapiens
tggtttgctggctttgccctctgtgggttacagaaaggcctttgcttatawatccatggagctgaaggtcacatgaagggcttgcctgcactagcttattt

SEQ ID NO: 2009 - DNA, 101 bp, Homo sapiens
cacatcaataaagcactatggaaacaaaggcacaagaacttaactttgtcmaatgaagtctttcaggaggaggtgatattggagctgaattttaaaggatt

SEQ ID NO: 2010 - DNA, 101 bp, Homo sapiens
ataccaccacaaaataaatgcaaatattttttccctagtaaacctccacasagttaaagtcatgcctattttatctgaaatcccataggagactagaaatt

SEQ ID NO: 2011 - DNA, 101 bp, Homo sapiens
aaaaacgcttattgagtgccttctatgcataatgaactatgctgggtgacrtctaatgcagagtctttctcaaccaggtgtccaggagagaactgagcttt

SEQ ID NO: 2012 - DNA, 101 bp, Homo sapiens
aatagaatagcagtaatattgtttcatccctttttacagtcaacttcacawgaatagacaaattcaaaagtatgatgttataacagcaccatcttgtggcg

SEQ ID NO: 2013 - DNA, 101 bp, Homo sapiens
aatgtctcagacttacttgaaccaagtctggttcctccaagcaagcggtcrttcattccaaagagggcctgatcccagacagttaactccaagcttgactg

SEQ ID NO: 2014 - DNA, 101 bp, Homo sapiens
aaaatacttggctgtattatggctcagctgtagagtaaaaactagacttargcatttccaattaaggcaggctaggcaatttcaaaaccagttaagtcact

SEQ ID NO: 2015 - DNA, 101 bp, Homo sapiens
tatcagtttgacctatagtttaatatatggtggtttaatatatatatatgmgttttattctacccattataataaatatagtccagtaccccttcccttgt

SEQ ID NO: 2016 - DNA, 101 bp, Homo sapiens
atgttaaaaatattttaatatctttacaataactattggctatgccttacrgtactattgtctctctttaaacctctcttagaaactgtgtgttaggtttg

SEQ ID NO: 2017 - DNA, 101 bp, Homo sapiens
cctctctctgttccaccctgcttagcttgtaccaggtttactgtcttatarcggcaggatggtagctacacctataagcactagacttagaaacaactgca

SEQ ID NO: 2018 - DNA, 101 bp, Homo sapiens
ttcatttccacacggatgatcaaaacaagtatttctaaactgaaaatattyttgtttgcaatagacacacatgttctggctgtcaaagcatttctaaataa

SEQ ID NO: 2019 - DNA, 101 bp, Homo sapiens
ctttcacacccaatgtccttcactcctgtttcctatgatcacttgtccaayaaaatacctgcaagcaagtcttagtctctcactttgctgccttaaatgcc

SEQ ID NO: 2020 - DNA, 101 bp, Homo sapiens
tctacaggtatagaatatctaatattctatataactttttgcattcagcartaacataccctggacatttttctatgatataggatcaatttccattctac

SEQ ID NO: 2021 - DNA, 101 bp, Homo sapiens
atcactcttttgatataattaaaaacaatgtgatcactagcttaaaataayttgaatggctaatataactatctgcagtttatgggtccttatatagtaag

SEQ ID NO: 2022 - DNA, 101 bp, Homo sapiens
gaactctgaacaagactcttttttttttttttttttttttttttactacartagaccatttttccatggacacttttctactcttccttaggttatgaagt

SEQ ID NO: 2023 - DNA, 101 bp, Homo sapiens
attagaagaaaaggaagttttaggtttgaatttcttacaaaatcacctaawttatcagaattgttctctttcttccatatgtgatacagttatttagacag

SEQ ID NO: 2024 - DNA, 101 bp, Homo sapiens
ctgtagtgtatgtgttctccctaatacgactcttcctttctcctggatctmtacaccgctgacacttcatcttcctaaagtgcaatttgcatcacatcact

SEQ ID NO: 2025 - DNA, 101 bp, Homo sapiens
tttattaagtctcaagttttaaataaaatccaatagagaattgcaacatamggccgctgcaggaccaggtgaatcctttatgattattacagatcctcatg

SEQ ID NO: 2026 - DNA, 101 bp, Homo sapiens
tgtgttggccggcgggcaggggggtggtgggtgggcaattgtgtatttccrtggtagaatttgtgaaattaaactaatttttatttctcatttgtggtttg

SEQ ID NO: 2027 - DNA, 101 bp, Homo sapiens
taattcccctcaatttctctctttgaccaaggcatccatttgaatcaataytcccatacaacacagggtcattgtggcccaatgctgatctcaaatgagta

SEQ ID NO: 2028 - DNA, 101 bp, Homo sapiens
tgtctaggatcctgatgaatgcatggcatgtaagatgtggcccacatatgraaattcaaatgcacttttcactgaagatgtagttgacgataatgacctct

SEQ ID NO: 2029 - DNA, 101 bp, Homo sapiens
ggaaattcaaatgcacttttcactgaagatgtagttgacgataatgacctstttggtttcaagaaatgattatagatgaaaatagaagatgaattagcctt

SEQ ID NO: 2030 - DNA, 101 bp, Homo sapiens
ctttattctgtttttatgatgaattttgttcattgatttgttgaagtgttyaatgctttatgagaaatgcgcttgcaaggtagaaagggtgagggaaaaga

SEQ ID NO: 2031 - DNA, 101 bp, Homo sapiens
atatattgcaatgtgatttaattactatactgacatctgtttgatccagaytgttaacaaaatagtctagaaaatattgtaattggaatttttggtcaaca

SEQ ID NO: 2032 - DNA, 101 bp, Homo sapiens
catcacagcaaaaataaataacactaaaatgaagaacacaatacaaaagaytagccaaatgaaaagctggtttttttgaaaaggtaaacaaaattggcaaa

SEQ ID NO: 2033 - DNA, 101 bp, Homo sapiens
gtggtaaactctgatgaattaggaccaaaatgcattggtttaaagtttggycctccaagtagacacttcagggaggataacaaattgtaggccttgttatt

SEQ ID NO: 2034 - DNA, 101 bp, Homo sapiens
atgattttgaaaagctttatacaaattctaatatgaaactcttcattgtcrtatattcagctacctatttcagtatgcatgtatgagtattaaaatcattt

SEQ ID NO: 2035 - DNA, 101 bp, Homo sapiens
ttgtaggcttttgtatgtgtaccttttaaagtatattcttatgtctctgaraagtaatcttataagtagatgctctttgtactgttttattctgctgtcta

SEQ ID NO: 2036 - DNA, 101 bp, Homo sapiens
gataacttgctgaactaactgttccaatggaagaagagaatagcagcataygagaacattcgccagctttgtgaaatgaatatcctgtgttctttctttct

SEQ ID NO: 2037 - DNA, 101 bp, Homo sapiens
acctaccaaagcactggtaaagtgataaaaatcctgtgggtacctaccaawtatgataaactaaggttgtaagagactccttcatcagctttagtcatgat

SEQ ID NO: 2038 - DNA, 101 bp, Homo sapiens
aagctctcgtatgtgctacagaatcatcttgttttcaggcaagttaacagyggaatattcttaaggtctaagttatgcactgaatggcatctaacagtaca

SEQ ID NO: 2039 - DNA, 101 bp, Homo sapiens
gatgtacacactcttcagatgtctgctctggagaagaactgaggtggattraggctaaagtgttgagcatgagaggcgtctgaggtcagggcttgctgact

SEQ ID NO: 2040 - DNA, 101 bp, Homo sapiens
taaacaacctaaaaggtagagatattaagtatgctttacagataagtgagycatagggaggttacctgaacccaagcaccctctttgcagatggtgtcagg

SEQ ID NO: 2041 - DNA, 101 bp, Homo sapiens
ttcacaatctagatgcttctgtgtcctgtctgtacctgtgacttcatagcytaatctgggaccaatgcagagttctaagatttgtactttacagaatgtat

SEQ ID NO: 2042 - DNA, 101 bp, Homo sapiens
cccagaatcaggaaaatgacatttcattcatccctgaatttatttattcaytacactatgggtacactaagccttctggaaagggatcagctccttaatgc

SEQ ID NO: 2043 - DNA, 101 bp, Homo sapiens
gggggcataccaaagagcccatctacacacactttcccctgtactgccaaygtttttcataagctcaattcataaagacctttgacttcccaacttgaggc

SEQ ID NO: 2044 - DNA, 101 bp, Homo sapiens
tgtgtgaattcctctcacagagttgaaccattcttttgattgagcaatttsgaacaactgttttcctagaatctgcaatgggatatttgtgagtgctttgg

SEQ ID NO: 2045 - DNA, 101 bp, Homo sapiens
tttcatctcagggaaaggatctgaatgcctatgcacttttccattatttayttattggtgtcatcagctaaactgttctcagcattaaattgatttatatg

SEQ ID NO: 2046 - DNA, 101 bp, Homo sapiens
aagaaaggttagcgtcttctctctgcccacagtgcaaaaccagaatgagcrggtaaatgctccagcacggcagatcatggcttagacagcagggaagcctg

SEQ ID NO: 2047 - DNA, 101 bp, Homo sapiens
attcggtatactactcctcacatgacaaaaactggccctatttcaattatrtatcaaatttttccatcagtaaacacgaacatcctcctatctctcttgat

SEQ ID NO: 2048 - DNA, 101 bp, Homo sapiens
ccccaagggctttataaaatacatgtgagtgtcataatcttttgtgacctytttataattactagaccaaggcttttagttgttgccctaagcctagctat

SEQ ID NO: 2049 - DNA, 101 bp, Homo sapiens
ctcccctttcctgcatgggccttgcctacacaaaggattgtgatatattgytaagctaagcaccaaggtgatatggctcttgattgggttcttcctaagtg

SEQ ID NO: 2050 - DNA, 101 bp, Homo sapiens
gttggtacatgctagaagctgttgtgcagacatgttgttctctgctttatkcaacttaggagacagtgtgcaatctgatccccagagaattctatcggggc

SEQ ID NO: 2051 - DNA, 101 bp, Homo sapiens
ggagctttaatgcaaatggcaattgtcaaaacagatgctccttaaatcgcytctttgtctgcagtcaggatcttagtaattctctatgggtgctccattcc

SEQ ID NO: 2052 - DNA, 101 bp, Homo sapiens
atctaaatcaggatttattgccatcttattaataatttagagaagttaatrtgctatttagagacccaattgtgataatgctttgcagtcacaaggggttc

SEQ ID NO: 2053 - DNA, 101 bp, Homo sapiens
tttaagtatgcaaaatgtttaagtcacattatttatttttcattgtgagayactaaaaactgttaatcagactacagctgttatctttcctctcctacaaa

SEQ ID NO: 2054 - DNA, 101 bp, Homo sapiens
taaaaaacgaataatagaacttccttgtagtttgtcatgaatacaagttayatacaaatgtcagaagaggagaaaagcaagtatgtaattcaagttttagt

SEQ ID NO: 2055 - DNA, 101 bp, Homo sapiens
gaacattgacaaagctagactgtccagacaaaaattaaaatggataaggcygtaaaacccataaatatcagaaaagaataatcatgggagcatggagaaat

SEQ ID NO: 2056 - DNA, 101 bp, Homo sapiens
tctacaataaaaattgaaataaaaaaatatagccctaatgtggactcttaygctttgggatgacataacctgttttggttccttaaaatgtagctgaaatt

SEQ ID NO: 2057 - DNA, 101 bp, Homo sapiens
gagtatatgggacaagtggcttgaatagggcagagaacaatattgagtatstaagagtcagatgttgtgatggacattttaaacctgccatctaatttcat

SEQ ID NO: 2058 - DNA, 101 bp, Homo sapiens
tctacttttagccttggagatcaaatagctaagtcaaagatcaaagtggtrtgtataactgttgtaattcttatgaggatcaggtctcatatgcaatggtt

SEQ ID NO: 2059 - DNA, 101 bp, Homo sapiens
tgagatagcaagagaacaccaggttttgctgtaattactaaaggcactgtytgacaaaactttattaaagttcagcactgtttcagattcctttagtctct

SEQ ID NO: 2060 - DNA, 101 bp, Homo sapiens
gctttattgctgctaccttttcactattttagtagaaaagatccatttcaycactgaattttagcatatgtaaacaagtggaaaataattctttgattaat

SEQ ID NO: 2061 - DNA, 101 bp, Homo sapiens
caatttgctttgtacctgtttttggtttagcacttaccatcttatgttccrggaaatcctttatctcgggcaaactgggtcatttggtaaccctaatttgt

SEQ ID NO: 2062 - DNA, 101 bp, Homo sapiens
ttaaatgatcttgggggttgtttcttatggtatattgattcatcagtaccwctttttttattactattgttttatagtaggttttttttatctggaggact

SEQ ID NO: 2063 - DNA, 101 bp, Homo sapiens
tcacataatttgtatgcagcctagcaaaactgactagttgagactttgtcrtggacatatgaattttattctttttacataaaaatatggtacctttgaaa

SEQ ID NO: 2064 - DNA, 101 bp, Homo sapiens
gtctcctaaataactgttaggaaagaaaatgggtatgtctgatactaaaayggaggtacaacaattctttctacataatggggtccagtaaaaatctgtgg

SEQ ID NO: 2065 - DNA, 101 bp, Homo sapiens
gcaagaacactaatgttttacttgctacacactgaaattaatagaaaaaaraaactccattgagatgaaggagctaagcaattaattttcctctttctcaa

SEQ ID NO: 2066 - DNA, 101 bp, Homo sapiens
tccattttttaagacactactggattgactcatgctgtccctgtattgttyttagaatgtatgtcttagaaaaatctgagacagtccattattctttatct

SEQ ID NO: 2067 - DNA, 101 bp, Homo sapiens
attttagcatcaggacataacaaccattagaactggagaagaataaattasaaagactgatgaaaaagctgaagacagttgttttaggccttcacaaaagg

SEQ ID NO: 2068 - DNA, 101 bp, Homo sapiens
taggcctgcagggctgagctcagcaggctgggtgagcatagacaggtcagytcacggtaaatatcaaatggaaaaatgtggagatcactgagttttgaagc

SEQ ID NO: 2069 - DNA, 101 bp, Homo sapiens
ccatcatgttcagtaactaacaaaaaagtttactgaaaactactgaagatsctatagctgtaaaactagttagatgagtattccattggaacaatagcaga

SEQ ID NO: 2070 - DNA, 101 bp, Homo sapiens
ttaaagcaagagattaaatgagaatgattactctgaattaatctttgaacsctttttcaaacaccaaaaatgcagagtgctagaaatttaactggcaagtt

SEQ ID NO: 2071 - DNA, 101 bp, Homo sapiens
gcacatgcacatatggagagacacactgactgtgaagatgtgtaacaaatrctacctcctgtacagttcacagcatctcaaaaaacaggcccaccagcatc

SEQ ID NO: 2072 - DNA, 101 bp, Homo sapiens
agccatatagaagtgtgtaattgaacacaaaatcatagaataagtttgacstggaaaccataaaactccttcctagtgacattttacagctggtccattta

SEQ ID NO: 2073 - DNA, 101 bp, Homo sapiens
actacccttataaaccaactttttgaataatcatgacatcatcggcgactktggccctgtaaaatttaaattgcactaggttttgttggtcactgtttaaa

SEQ ID NO: 2074 - DNA, 101 bp, Homo sapiens
agagtcaagctttccaacctcaggaccccccatgcacttggtttaaatagwgactgatttatttaataatgagtttagtatagaactgttttccttcttaa

SEQ ID NO: 2075 - DNA, 101 bp, Homo sapiens
atcaaacaggagacaatatatctagatttgtaaattcagaccctaacttgygacctatagcaagttttaaagtttttgacttttcactaccttatttgtaa

SEQ ID NO: 2076 - DNA, 101 bp, Homo sapiens
tactgtgaactgaagcttcctggaagaatacgagattttagaatcgtgatyagtttatcttggctgagtctaattaaggttttggaatgaggatctagcca

SEQ ID NO: 2077 - DNA, 101 bp, Homo sapiens
agcagacacatcactgcgtcagttcagtaggagagttcacactggcccccrtacaggtaggtctagttagcaaattgccaactacccatcatcaactggag

SEQ ID NO: 2078 - DNA, 101 bp, Homo sapiens
ctctgctacccatttcttcactctctttctttctatggctctcagaattcktgtcttccctacctaaagggaacacttaaaacaactcccatttcttcctt

SEQ ID NO: 2079 - DNA, 101 bp, Homo sapiens
aaaggagtaagaggaaaacaagaaaaacaaagaaaacaagagtcttaggayattgtgagggtctccattctccttcccctctaaaccaggctcatagtgga

SEQ ID NO: 2080 - DNA, 101 bp, Homo sapiens
gtactcatttcaatgtcagtcaaggtaaattactaagttattgacatactyctgaaaatgcaagaattctggtgttcagttcttgctacaagcaatttgat

SEQ ID NO: 2081 - DNA, 101 bp, Homo sapiens
aaaagaagttcgaatcgtacacccattctgctcctctcagtgaggtggacrgtcaaggattcagagtaggggtggctttggagtgggaaatgttaagatgt

SEQ ID NO: 2082 - DNA, 101 bp, Homo sapiens
atgctttaagtcctgtctgcgatggccagtagcagagctaagggtgtgacrgtaaagagcgcctgcaggagcccaggacttaggactaagaaaggaagtca

SEQ ID NO: 2083 - DNA, 101 bp, Homo sapiens
atttgacagtagagctagaagctactataaagctaatctatgttagaattwtgtaaaaagtcaggtatgcaacagcccccaggaatgagtgcagagacgag

SEQ ID NO: 2084 - DNA, 101 bp, Homo sapiens
aaattttctcaattcacatgtcatctgtgcagtttattatcaagtacctgmcacttagaaagccatatgttctatttgactcaagcagacctatgaggatg

SEQ ID NO: 2085 - DNA, 101 bp, Homo sapiens
aagaaacctattacactaacttaggaaagttatttggctcctagagaagcrgatgaataaattgaactcatacagggtttttcataacacacttttcaaag

SEQ ID NO: 2086 - DNA, 101 bp, Homo sapiens
agcttagaattcaacctacattctgtgaaagaaatacatgaaggaatcaayaagttaataagtcctactatatgtatcactttttagcatactataaatgc

SEQ ID NO: 2087 - DNA, 101 bp, Homo sapiens
ttgtctcattttgtcttgcctattgtatgctgcctttaacatcagtaacaygtggcgttcataagtgtctgtttgccaaaagggggatgtatcctggaata

SEQ ID NO: 2088 - DNA, 101 bp, Homo sapiens
tatagataatatttaaaaccatggaactagatgcaatcaccaaataaatgwgtgttagtaacaaagaagaggttcagggactgaactttcgagtactcaga

SEQ ID NO: 2089 - DNA, 101 bp, Homo sapiens
ctataaactgaaaagccatgcattttgtatctccatctcatctttccttaraaccagagatttatgtatccagctgcctcatggacattttcacttgaatg

SEQ ID NO: 2090 - DNA, 101 bp, Homo sapiens
tgcttttcccagaaaattatttccttttcttatataatagcaaccaatgcmtattttgatagagaataagaaatgaaaacaaagagagaattggaagaata

SEQ ID NO: 2091 - DNA, 101 bp, Homo sapiens
tgaataggatttagaggttagagaacactttaaatgagggtgtaatttaaygtaggattttggaaaaaaaaaaaaaaaaaggtttttcttttaaccttcac

SEQ ID NO: 2092 - DNA, 101 bp, Homo sapiens
tcaatcatctctaaactccaatgaatttttttctctgtggttcctgaatcrttatgaaaagtatggaggatatcacagcttccactttcagtgaaactgac

SEQ ID NO: 2093 - DNA, 101 bp, Homo sapiens
agagatagtgcagtttttcaatattattttaaggcatagagacgatagtaraagttgaagaccattgcaaagtattttgagtttttctaaccattttgata

SEQ ID NO: 2094 - DNA, 101 bp, Homo sapiens
atcattagcatctttataacagcagcactagcctcttgaatatgttgggcyacgtgacaaacatggacagaaaatcttggcaagcccctgccctgtcactc

SEQ ID NO: 2095 - DNA, 101 bp, Homo sapiens
attttgcattatcttgtaaagttgaatttatctaccttgtaacctcacagytcttttccaaggactacactctagaaagaccattacagaaacttggaaca

SEQ ID NO: 2096 - DNA, 101 bp, Homo sapiens
tggaacagatgagttaaaaaatgttgtctgtaacaagaaggagtatgaaasaagtcaaatggataaattaacaatgataacttcatgtgaccagaacagta

SEQ ID NO: 2097 - DNA, 101 bp, Homo sapiens
tgtcttagctgaaaagctttagacaagttaactacttcctctaaaaccatstataaaatgggactgataatatctatctaatagtgtttgtcatacgtatt

SEQ ID NO: 2098 - DNA, 101 bp, Homo sapiens
caataatgttctagaatataaaatgttcccaagttgacttctgatagcaasgaaatgttttagtgaatcatggacctcagaccttaatactgtatataaaa

SEQ ID NO: 2099 - DNA, 101 bp, Homo sapiens
atcaaggaaagcaggtcaaattctaagtcagtttcgctctttcttactttstgcaaattgattgtggaggaaggagggaggaatgaggatgatggtggctg

SEQ ID NO: 2100 - DNA, 101 bp, Homo sapiens
aaggggagtactgctggtgtgaattctcccatcagtttcctttctgacttstttgaatctagcatttttaacagttttctttgaaataatattcactgaat

SEQ ID NO: 2101 - DNA, 77 bp, Homo sapiens
gacaaaaatcgcaaaggtcagaaagayacagttcaaaaaaaaaccagaaatagcacagtcaaaacagacattagaga

SEQ ID NO: 2102 - DNA, 101 bp, Homo sapiens
tctcagagtaaattataatcaatgagtcattcccagggctctagagctgcrtcttttctattttagaccccaagacattttggtgacagaggtctcaaaga

SEQ ID NO: 2103 - DNA, 101 bp, Homo sapiens
cactttctcttacatgctccacagaaccctcaagtacagagtccatggaargccctcaataaaccattttgctgattgactaacaacaacaagaaagcttc

SEQ ID NO: 2104 - DNA, 101 bp, Homo sapiens
ctggcatcagctgaaaccaattattattttagagaggcttgaacatcaaakattttcttccgttctgttggttgtccgttcactgtcctgatagtgtcctt

SEQ ID NO: 2105 - DNA, 101 bp, Homo sapiens
ggagttaagatcaatgaagtaggaacagaagatacttccagggaataaaamagtgagccaagaagtaaaatcaattttacatatgccaaaattgaggtcgt

SEQ ID NO: 2106 - DNA, 101 bp, Homo sapiens
gacttagagaaaatatttgaatatatttgcttaaaaaccaataaggttgcktaacagttatctctcacattacagaaactttcaaatatctgaaaaaatta

SEQ ID NO: 2107 - DNA, 101 bp, Homo sapiens
caagggcaactggcagaacatctagaataaagatggcagatggttgttacyagatagaaaaactagaaattggagaagatatttgacacgttgtcggccct

SEQ ID NO: 2108 - DNA, 101 bp, Homo sapiens
cattgtaatctgaagatgagttcctcttcagctcagggtctttttctctcrtatctttgatgatttcctccccttccttctttgtctcctttggaattcct

SEQ ID NO: 2109 - DNA, 101 bp, Homo sapiens
ctggatttgtaacttggttgctgtattgccttgaacaagtttcctatcctyggtgatacaccactgcttcatcggtgaagtggaaatgacagtactcccat

SEQ ID NO: 2110 - DNA, 101 bp, Homo sapiens
gaaaacttctgctaatcagacgacaccatacagaaaatgattaggcaagcsacaaattaaaaaaataatttacaaaacatatctgacaatggactagtgtc

SEQ ID NO: 2111 - DNA, 101 bp, Homo sapiens
caatggtgaaccttcctagttgagcagggttaccataacccacacctggaygtatcaaagaaaactgtgcatctatctgctcaaagttgtccgaattccca

SEQ ID NO: 2112 - DNA, 101 bp, Homo sapiens
aaaatagtcacaataaacactgccattcacacagggaaagagaggaggcayattgtactcactggtacatagcaattctacaatcccactggatggcgggt

SEQ ID NO: 2113 - DNA, 101 bp, Homo sapiens
taggactccttggctcccaagagcaatgccagtattaaactacacgatgayaggggctttcattcatcactgcaataggaaagatgacattcagtgattcc

SEQ ID NO: 2114 - DNA, 101 bp, Homo sapiens
caaagaggaggtttctctctgatgatctccctgtgtgggaaaaatcctgastcccagggcaatctcagatccagtggcatccctcatcctgggggtctcct

SEQ ID NO: 2115 - DNA, 101 bp, Homo sapiens
cagcttaattgaatatagaattcttgatctacagactgctttcctctaaaytgtgtaaatacaactcctttactttttacttcataactggaaggaaaagt

SEQ ID NO: 2116 - DNA, 101 bp, Homo sapiens
ctgtgccattttgcttagcctcctatttcctgggccagttacgatcttttkgaaacttaaataaatcttccagtacttggcagcacctgagataaagtaag

SEQ ID NO: 2117 - DNA, 101 bp, Homo sapiens
taacagtctcacatatttgatttcctagtcacagcaaattggatgttgcaygtataagacctacaggaggcggaagaggaaagctttagataaagctcaat

SEQ ID NO: 2118 - DNA, 101 bp, Homo sapiens
atttgcaacatcttcacttgctgaactgattgtgaaagtgactatcattcrtgtggcttaattcagattttaagaatggagttcaggctggaggttaaaat

SEQ ID NO: 2119 - DNA, 101 bp, Homo sapiens
cgtgtgtgagatctttctagtgtgtatgctagcaggagaattactgagttktaccgtacatgtatcttcaatcttattagataacactgacttgtttttga

SEQ ID NO: 2120 - DNA, 101 bp, Homo sapiens
ttaaattttaatttctggcttactattggtttgtttgtttctttttctttrataacatggtatagtccaaatgaagtgaccttctggactatcccttttag

SEQ ID NO: 2121 - DNA, 101 bp, Homo sapiens
attttaattgagtaatagattaaatcactgaatacatctgaggagaaaaaygatatcttaataatactccatttccatctatctttccacgtacagctttc

SEQ ID NO: 2122 - DNA, 101 bp, Homo sapiens
atgttaactttggcccaatggcaaatatttttcagtgtggttagtgtttaygcactgaggacatgaaaattaatatctattcttctctcttggattttatc

SEQ ID NO: 2123 - DNA, 101 bp, Homo sapiens
gtaagcatgcgtccatattttttataagacaaatttccagaggtggaattkctgcctaatggtatgcgggtggatcacgaggtcaggagatcgagaccatc

SEQ ID NO: 2124 - DNA, 101 bp, Homo sapiens
attcttactctgataattcaagcaaaatttcttgaattaaagaggagtatragggaggctgttgtgaggtaggtttaatttttatcttcattctgatctta

SEQ ID NO: 2125 - DNA, 101 bp, Homo sapiens
gttttgttttgttttgttagttgttgttttcctcagacaggaccttgtcarcgctttcaaatatgtaggctgtttgctgtttcctttatgttggtccctga

SEQ ID NO: 2126 - DNA, 101 bp, Homo sapiens
tatcttcactcctcaggccacctccccacccacactgctcctcttcctgcrttcaggtgtagtcctgggttttatcagccgggctgccccatcaaccacgg

SEQ ID NO: 2127 - DNA, 101 bp, Homo sapiens
atgtgaaagaaagtaatagctgtcttacactattgcacacacacatgctcragagttcttcagaattttatttgaaaaatcgtattttgaaagttttggaa

SEQ ID NO: 2128 - DNA, 101 bp, Homo sapiens
gcacaatgtttcccctgtgcagccaggtgactgtgctgtacttagcctggrctgtggtttatacaccctcattgagagcatccgctatgtgccgtgattct

SEQ ID NO: 2129 - DNA, 101 bp, Homo sapiens
tataagcagtcctttttcagcacattatattggtgcttataatatgttatsagaagaatagtttttgctgcatgtcataaaaacctggattccaacagtct

SEQ ID NO: 2130 - DNA, 101 bp, Homo sapiens
taaatcattttaccgcttggcaactggacattacttcaactgaagtaggcragaaaaataacagcttcccaatatcaaagaagatgctaccaaattggtaa

SEQ ID NO: 2131 - DNA, 101 bp, Homo sapiens
cgccccctggagtcagaaagactttgattaaatacctatgtagtgaatgamtagctgagatcttcagcaagttactgaactcagtgcttcagcttctttta

SEQ ID NO: 2132 - DNA, 101 bp, Homo sapiens
actctaaggaaagcaattgcacaaaaacggctatatgtgacaactaacacygggcactaggcccaatgtacaaaagggagaactggggtgtttcaaatagg

SEQ ID NO: 2133 - DNA, 101 bp, Homo sapiens
agtttcatgttgtcacagagtcacttcagattccttatgattcagacctaygtgattagattcagaacataatagactagatcacttttagataagctaat

SEQ ID NO: 2134 - DNA, 101 bp, Homo sapiens
gatgttaaacatgtggtacttgagcagaactgcaatccctgattaattaamcatgaagagtactcataaaaggctacatgagttggcagctttcataaaga

SEQ ID NO: 2135 - DNA, 101 bp, Homo sapiens
actttgtataaagtggtgagtaacactctctacaccttttatcagtttccrgtgataatctaaatgattccttaacatttcagaaagactcttgttgcctt

SEQ ID NO: 2136 - DNA, 101 bp, Homo sapiens
ctataggaagaacagttaataaaggaacaagggggacaaaaataagtatcygggtggtatatggaatcaaactaaatctccctcaaacagcccagtggaga

SEQ ID NO: 2137 - DNA, 101 bp, Homo sapiens
ctagttaaaatatctattgattgatctgccaatctattcatatgtctcttwccagtctacctatggcacatacacagtgcatgctgctgttccttctactg

SEQ ID NO: 2138 - DNA, 101 bp, Homo sapiens
gaagaaactgctctcacttgtatcattccttcccaaaatgcaaacagcagscctttcttaattatccacaacaaaactgagaccattatactatttgctta

SEQ ID NO: 2139 - DNA, 101 bp, Homo sapiens
cactaaattttaaaaagcagctcattaattatctaaatattgtcatgttakgcttttcctaattttttccgtgtagctttatatatggggacagtgggtct

SEQ ID NO: 2140 - DNA, 101 bp, Homo sapiens
ggatttttgttcctaatcacgaacttggctagctcataatttaatatttayttgatgtctaattaggcaagtgtcttgttaactgttaaattaaagttaga

SEQ ID NO: 2141 - DNA, 101 bp, Homo sapiens
cacaaaacaaactgatatatacaaatctaacttaaaaagatggataagacyttaaataagatgtagcatcgagatgacctggatttaatggtgacaaatgt

SEQ ID NO: 2142 - DNA, 101 bp, Homo sapiens
agacactgtggttctctgttaaatcctatcagatctgcacaatgggactaragaaacttgatgtctggatagtttgaagataacagcagttccaacagcaa

SEQ ID NO: 2143 - DNA, 101 bp, Homo sapiens
gtttctgggtaattctctttctctggtggcacaggactgtgagctaagaasgatgaattctgctgggtttattaaaggtcagaattgtgtttggaggagcc

SEQ ID NO: 2144 - DNA, 101 bp, Homo sapiens
gtctttccccaaagtaaagcacattctttaagactcacaatattctgcatyagccatttattcttatatctgggaactgtagttcttgaagtctcttaatt

SEQ ID NO: 2145 - DNA, 101 bp, Homo sapiens
aaattaagtttagatcaaacaactgccaagagagtgcaaaactgattaaaragttattcacagtgatttatcaatggtttttctatcaactaaaaggcaca

SEQ ID NO: 2146 - DNA, 101 bp, Homo sapiens
cataccgggtgaaatgccaagtaaatgtttgttaacagaggtgtccaagcrcaagtcactcttttttttctttttttttgaggcagaggctccttctgttg

SEQ ID NO: 2147 - DNA, 101 bp, Homo sapiens
tgtgtgtgtctgttggggagagaggagttgttaagaattgatgttacttgygctctctgaattccagaagccacagccaatagtaaaattagctgttacta

SEQ ID NO: 2148 - DNA, 101 bp, Homo sapiens
tagtatactttccctgctttgaactttgttagtaacttacattctctcacraaaagtattctgcattatattatagttataatgaaccctgattatcatcc

SEQ ID NO: 2149 - DNA, 101 bp, Homo sapiens
tcttattccccaaattattctccattaatgctgctactaatttccacttcwgtgttttgctgctgttccttctgccaggaatgccttcctctaaatatcta

SEQ ID NO: 2150 - DNA, 101 bp, Homo sapiens
gcacataatcctcaacccgacatttgactttgaaattaattttacagttayatttgactacgtgtaagtcctaaattatattgtgaaaagccagatggtga

SEQ ID NO: 2151 - DNA, 101 bp, Homo sapiens
aaaggagtgcttggtgagattcagatttgtgggacatcagcatctaggatragacgaaaacgaagggagtggacgggagtgagaagaacagtggaccccag

SEQ ID NO: 2152 - DNA, 101 bp, Homo sapiens
gcaggaagaagagacctagaaacagatggtgaaggatcagccagagaagthtgaggaggataaggacagagtacagtctcagaaactggatccattaagat

SEQ ID NO: 2153 - DNA, 101 bp, Homo sapiens
ttaattacaaggcaccctgttgctctagatatttggagcagggtggataayggaagtagtgttttagctgaaagccaaacaagaatttcagacatgcttga

SEQ ID NO: 2154 - DNA, 101 bp, Homo sapiens
gtggcataataaatatgaaagttctccacaaaattaaagcactaagtacaytgttaattgagaaaacaccatgaaagattttttgtctttctgacactatt

SEQ ID NO: 2155 - DNA, 101 bp, Homo sapiens
ctaaccaatgaggtcatgtataagttaaaatttcccacgtatatacatcayttgttattttacttcatgccaaatttcactagaattatagaacaatagga

SEQ ID NO: 2156 - DNA, 101 bp, Homo sapiens
gaaagcaatgatggagtgtcatttcactagttgtgcccttagccatttttktgtccaatgatgaaggtcttttaacaaataagtacatgcatacttattgg

SEQ ID NO: 2157 - DNA, 101 bp, Homo sapiens
ttttgtgtccaatgatgaaggtcttttaacaaataagtacatgcatacttrttggaggtaggtccatccgcaagcattgtgtctatagaggaagaacaaag

SEQ ID NO: 2158 - DNA, 101 bp, Homo sapiens
tgtatagccctttttctcgtctaactaaattcttaatggatgtgataacaktcagaaagtaacaaatgttatacaaatttaagttttttaattatgtgtag

SEQ ID NO: 2159 - DNA, 101 bp, Homo sapiens
agttagacttgaaatgcacttgagaaattgaacttgagtcaactatctggrtttaatttttatcataaatgttaagcagtgatgaaatatttatctaagta

SEQ ID NO: 2160 - DNA, 101 bp, Homo sapiens
aatcattttgtactgacatattgtaaataacctgtatcttgaattgttttktagatttctgatttcaagtgtacaatgtaaatgagcagatcattattttc

SEQ ID NO: 2161 - DNA, 101 bp, Homo sapiens
tactctacagaaaactaagggtattttaaccttggctaaatcatatttttkctaagttagatctaatttatatgagctgtgctcattttaaaaattgcagt

SEQ ID NO: 2162 - DNA, 101 bp, Homo sapiens
agccacccctctgcacactgcccttctcctctttgctctgtcttgcaactycattgtcctgctttccgctgcccagggccatgggctgcacctgtttgtgc

SEQ ID NO: 2163 - DNA, 101 bp, Homo sapiens
gaatcctggagttgtccttgatcccactttctcccaaagacaattggccayggttctacctcttactttatcacgaattcaggaagactggctgttcctag

SEQ ID NO: 2164 - DNA, 101 bp, Homo sapiens
gcctgaatgacaaattgcatgagtcaaagacatttatgaaaatgacaaacrctatttcagaggaggaaggcagttgcttctgctttcttttttcttttgag

SEQ ID NO: 2165 - DNA, 101 bp, Homo sapiens
cctgggaataaacaatagaaattgaggatacagaagctgtagaaccatagrccaatagagtttaaaacttgaaagacttcttcaagagatcatctagtcta

SEQ ID NO: 2166 - DNA, 101 bp, Homo sapiens
caccagttcttcttccttggcaaagaaattcctccttaaatgcaacagaastctactttattggtgtagctattccttgatcctaattattttatgtttct

SEQ ID NO: 2167 - DNA, 101 bp, Homo sapiens
caaattaaaaaacctgttactctgatcatggtcttgtctctttccttaaaygtgtgaactggtagaaggccaggagtatggcttattcactctggtgcccc

SEQ ID NO: 2168 - DNA, 101 bp, Homo sapiens
acatgttatcaggagacacaaattctcgtgtaacctttgctgtcgatagtmgttgtgtaagccaattcatctctttgtccttcagtcttctcacctataaa

SEQ ID NO: 2169 - DNA, 101 bp, Homo sapiens
gggccattttgaggggaaaattaaaaaattgtcatggtggaatatttcaamaacaagactggaagtaataagcagatgatgccctgaatatttttcacaga

SEQ ID NO: 2170 - DNA, 101 bp, Homo sapiens
ggtatggctgtgctgcaataaaactttatttacaaaaagaggtggcagatktgaagtggcccttggtttgtagtttgctgacctctgcattctatggtctg

SEQ ID NO: 2171 - DNA, 101 bp, Homo sapiens
cttttccgagtctggggtaggcagccatggagctattcttccagtctgacratgactctttctaaatttggtaacatgggaagaattgaatatggcctgtc

SEQ ID NO: 2172 - DNA, 101 bp, Homo sapiens
agtagtgagtcaatacaggctctcaaagagagacttgaaatggtccagctmgcgatgagaaggattcactgagaaagaatatcctgaaatggcatgcctga

SEQ ID NO: 2173 - DNA, 101 bp, Homo sapiens
aagataaaatagtggagaaagacttctcagaggggacgagacctcaactcsgttttaaatttatttattttttataaataatagttgtacatatttgggga

SEQ ID NO: 2174 - DNA, 101 bp, Homo sapiens
ggcatttcaactatgcaaacattctagagcacagaagagaaaggaaacacratctgcaaaagaacaataaaaaactcagtatggaatcatttatacaagac

SEQ ID NO: 2175 - DNA, 101 bp, Homo sapiens
tttccaagttcttcaggaattcttttactgcaattggctcagcaactgaaygaagagacttgataagttctcacctttgcatgcacacatcacttctgtgg

SEQ ID NO: 2176 - DNA, 101 bp, Homo sapiens
tgtgttgctggagccctaggtaccagaaggggcttggagaaacatgagackgcacggaagctcgggccagcttactgcactgtaagctgttaaatgaagag

SEQ ID NO: 2177 - DNA, 101 bp, Homo sapiens
cccccggggtataaaatacagataaaaatctcataatattaacctttgatkgctgatattcatgaagactggaactctctacggagctccctgagattggg

SEQ ID NO: 2178 - DNA, 101 bp, Homo sapiens
tgttcatattttcaatactgacttcatgtttgggcacatcttatattttcytattcgtgtttcctttatttttaatttcttaacatacctttaaaaatgta

SEQ ID NO: 2179 - DNA, 101 bp, Homo sapiens
tttaagaggaaataaattataatacaatgtgataatcattataagagtatrgaaaaattcctgagagctattcagaggaccaagcagctgcctcagtctgc

SEQ ID NO: 2180 - DNA, 101 bp, Homo sapiens
tctgtatttgtcttctacctaacacatggtaggggctcaacaagggttgartgaatcgctacatgttggctggatgtgttactacctgggaagctctctga

SEQ ID NO: 2181 - DNA, 101 bp, Homo sapiens
ttgttcatcttgatgcaatttcagtcccattcttgggaaaataataattayaggtacaacaaggtatttaaagaccaaaaaaatactcatgaaaacaccac

SEQ ID NO: 2182 - DNA, 101 bp, Homo sapiens
gaattttcgaaaggagatacagcttggagtatttcccaaatttaccgactrtagatccctttttttcgcaacagcattaattgggctagttgggcacagat

SEQ ID NO: 2183 - DNA, 101 bp, Homo sapiens
cagtttgctgacacctggccccagctccataatggaagacgttagggcacrtttagatgcttgaggagaaaagtcaatcgtcaaccagcccatcccctgca

SEQ ID NO: 2184 - DNA, 101 bp, Homo sapiens
caaagcttacaagaagctgacaagagaaactggcccatatagttcaactgwctttagtgagaaacagcatgttctctgggtaaatataaaaatgagactca

SEQ ID NO: 2185 - DNA, 101 bp, Homo sapiens
acgcaggacagacagctgtaaagtcatccaagcttgaactgcaatagcatraaccagtacacattcctaaaatgcttaaataagatataatttgaatatag

SEQ ID NO: 2186 - DNA, 101 bp, Homo sapiens
tcgagccataaaataacacaatccaattgtctttctgactcgccacattaygagaattccttatggaagagctgacagtatttgatggattgaattgaact

SEQ ID NO: 2187 - DNA, 101 bp, Homo sapiens
gatagtaagcactcgggggctttgcagaaagtgtagagaagctattggacmttttacaatttataagacaaaaatgtgtgctattctaatctagatatttt

SEQ ID NO: 2188 - DNA, 101 bp, Homo sapiens
aaggcatgccctagctgagttataagggtgaatcatagaggtaagatttcrttcctaaaggagtgaatatctaaagaagggaagacaacaataaataacat

SEQ ID NO: 2189 - DNA, 101 bp, Homo sapiens
gattttattgtgcctcttttttggaaggagagagctaggggactcattgcrtcaggaatcaatagtgagtcgacaccttttcgggcttcctgttgttagag

SEQ ID NO: 2190 - DNA, 101 bp, Homo sapiens
gatgctgccagcaaaaagagagagaggtgatactctcaaattaagcaggtsaaggagagattaatagagcacctatttacaaaagtataggcaaagtaaag

SEQ ID NO: 2191 - DNA, 101 bp, Homo sapiens
catacttccacatattcatttcacaaattggtggtgtccagatgtcctacrgcaaggtttttttgttttgttttgttttgttttgctttttgagatggagt

SEQ ID NO: 2192 - DNA, 101 bp, Homo sapiens
atctagatttttagagtagatcaggaggatgtcccagtaacaatactcaamgtaatgccatcattagcacttgagctgggaagtcaggtttccaggttcct

SEQ ID NO: 2193 - DNA, 101 bp, Homo sapiens
gtgtctcccggacaccaatccagtgttgggaggtgagagcgcagagataaytagcaaatcttgccctagggttagggtgaagaaaaggaactacaaaaaga

SEQ ID NO: 2194 - DNA, 101 bp, Homo sapiens
ccaaaacttggagacatccctgtccatgcccacacatgcaagaaaagaagycttcaggtgattttagccaccagccattcaatgcttaccagctgaaagcc

SEQ ID NO: 2195 - DNA, 101 bp, Homo sapiens
ttcatccattcgtgttagtaaagaatatcattttttttcttaaaacgcttygattctccactggtaattttcagacttcttatgggtgagtggccaggatg

SEQ ID NO: 2196 - DNA, 101 bp, Homo sapiens
ctccaaatcaagctgttttccaaatgagtttacagagaaataaaattgatwtgctttaggaccaccaatggggagctgatatcctttgttcaagttcccca

SEQ ID NO: 2197 - DNA, 89 bp, Homo sapiens
ccctcatggcctcaaaaacaaccacttatttctaccatggcaagccttgaygggagagccaattcggaaggaatgaagatgctgaattc

SEQ ID NO: 2198 - DNA, 101 bp, Homo sapiens
ggtgttgatgacagaggacttcatggtgagtgaaacaataacatggaatcrgaaacctttggcccagatttcgtttctggtgctaatcccagggtgctcac

SEQ ID NO: 2199 - DNA, 101 bp, Homo sapiens
gctttttcagccctaagtatgtacttacacattttataacattttatagcrtgaactgaagtgtgtatttgtgtgtattcaggtatcctgacagctttctg

SEQ ID NO: 2200 - DNA, 101 bp, Homo sapiens
tgtgtgtgcatgtgtgtatatgcatgtgtacatttgagtgtgaggtagtaygtttctgcatgttagtgtgtgcatgtatgtttatatgcatgtgtatatat

SEQ ID NO: 2201 - DNA, 101 bp, Homo sapiens
aaccagccttaaaacaatcacacagtgggaatatctgtctcggaataccartgagaatataccttcagaaatcacacatcccaggcatgtttcaggaaagc

SEQ ID NO: 2202 - DNA, 101 bp, Homo sapiens
ctccctggaggtcacaggctgaacaaccactcagagctggacttctggacrcctaagcaaagaaggaagtcctacccttggaccacaagaggctgcattaa

SEQ ID NO: 2203 - DNA, 101 bp, Homo sapiens
tattggtaacatctgttgatacgagatattggtgccatctattttctttaytcttccttaaagatccttattttacttactttaaaaacggtaataattaa

SEQ ID NO: 2204 - DNA, 101 bp, Homo sapiens
tctacttttcttctaattattaagttggaaaaaaataggaatttaacaggmgcttcaggtttgttggcagtttaattttaaaaaaagaaatgacattccaa

SEQ ID NO: 2205 - DNA, 101 bp, Homo sapiens
aaaacacttttcctggccaattgtctttgattcattgtatactttaaatasagtaggtatgcatttaattccctttttttctttctttttttttttttttt

SEQ ID NO: 2206 - DNA, 101 bp, Homo sapiens
aaaatagacaataacacatgtatgtatctatttcaacagtttctgggtgtytacagtgtaccgagcactgtatatttgaccagataccaaagagagtcggt

SEQ ID NO: 2207 - DNA, 101 bp, Homo sapiens
gccacatcacccttcacctgaattttgccgtagcattactgttgattccaygcctataatgtaccctttgctagtccaccctccatgttatctcaagagtg

SEQ ID NO: 2208 - DNA, 101 bp, Homo sapiens
cacatgcatctgcagtcacatgaccccttcccatcttcaaagcccacttgyggtatcaatctctctgacttccctttctgccaccagtcagagaacgttct

SEQ ID NO: 2209 - DNA, 101 bp, Homo sapiens
ttcactgcacctatcaaggtttataagaagatgttactgggatatgttaayttagaagctgttgctgattggtctggtacacactaggtgtttagggaaca

SEQ ID NO: 2210 - DNA, 101 bp, Homo sapiens
actgtgcccaagaaacagtctgaatgtttgtattcaagcacgtcacacaaracaagaggcacttactgcggagctgccttatactccctgggagatcacaa

SEQ ID NO: 2211 - DNA, 101 bp, Homo sapiens
agccagcagcagatggcaccacaggacaagcacaagctgtgtccaagagartggctcaagaaatctgcccaaaatccaacacaaaaatgaacaaaggaact

SEQ ID NO: 2212 - DNA, 101 bp, Homo sapiens
gatttgtattattttcttagggctgccgtaacaaattgccacaaacttcayggtttaaaagaacagaaatttattatctcacggttctggaagtcagaagt

SEQ ID NO: 2213 - DNA, 101 bp, Homo sapiens
tctgcaggggcctggggttctgcatcaaaaggagaaggagagagtccgggwaatgttgttactgactccatttttacccacagaccagggaaacatggata

SEQ ID NO: 2214 - DNA, 101 bp, Homo sapiens
atagaaacacttagaattattatagggtttgtaattactgtgacattgccrcttaggtagaacacagacaggtgtgttccagcctgttccaccaggctgag

SEQ ID NO: 2215 - DNA, 101 bp, Homo sapiens
tgcctgccattttccaagatgctgcctgtggaggattttatcaggagactyggtaaaaagaattgcagaagttgtttcttcaggcagtctcctagacaagg

SEQ ID NO: 2216 - DNA, 101 bp, Homo sapiens
aaagtgggggagcaagagaagaagtggggaaagattcttatttccagtgargtgttaaaaactacctcatgtttttggagcaagttcccaaacaaatgttc

SEQ ID NO: 2217 - DNA, 101 bp, Homo sapiens
gaaaacatcttagaactgaccactgatgtataagactaaaaatctcagtcyatgccttctacttttattgaacattcagtgagcaaaagacagactgaaga

SEQ ID NO: 2218 - DNA, 101 bp, Homo sapiens
tcttttcccaaaggcaggatattcaggtaggacaataaacagtggtagcayatcacaaaattataccttttttcagtttgaaaaagtggtaacaagaactt

SEQ ID NO: 2219 - DNA, 101 bp, Homo sapiens
aatgagtcactaaatgaattatagtcacacaacttagtatgttagtttacrcgccagaaaaagctaaataaagtttaggattgatgttaaatttgatcttt

SEQ ID NO: 2220 - DNA, 101 bp, Homo sapiens
cttcgggtctagacaccagttgctgagtccaggaatgttaggggtaccagracctcatcactttctctatgaaacatattccaagacccaggaggaaggga

SEQ ID NO: 2221 - DNA, 101 bp, Homo sapiens
tgcatttgttcaagaccaggtctacaccacgtaagcaatctactacatacrtgagctgtagattctaaagcaacaccgtccactggaacattctgcagtga

SEQ ID NO: 2222 - DNA, 101 bp, Homo sapiens
cctgcaagccaagctggagctggcagatggggatcagggctgggaccttcytgacaatgatcatcgccactgctgaggctcagtaaaatggccaggagcag

SEQ ID NO: 2223 - DNA, 101 bp, Homo sapiens
tacatatgagagagaagataccaaaggcagtcaggaggtataaaagggcaytctgtccaatttcaagcccctggaagccacattatcttccctttccttct

SEQ ID NO: 2224 - DNA, 101 bp, Homo sapiens
cccagaggtattagtggccacagctgatagctgatgagtccagctgaggtygataggatacatcagcattctccagataagcttgatgcgttcatgctccc

SEQ ID NO: 2225 - DNA, 101 bp, Homo sapiens
gagatggggtaattgaagctcatgctccgaacagttatagcaaaggtaatytccatggcggcatttgaaatatccccagtgcacagggaggagggtggtgg

SEQ ID NO: 2226 - DNA, 101 bp, Homo sapiens
ggaagatcaaaaaagataaaatattttaacactgattgcataaaaagtatwaaaaatggtaatgcctaatatagcaagtttgtattgcttatagcagtgta

SEQ ID NO: 2227 - DNA, 101 bp, Homo sapiens
acttcagtctgcacaaaaggaggccaggcttgacactaccaaagatgccamctgtttctgggtagcccaaacctgcatctatcttgcctttcaggttattg

SEQ ID NO: 2228 - DNA, 101 bp, Homo sapiens
taatgagtaatgattcttgaatcatttaaaccacccagacctagtagtaawttcaacaacacagtcaagtcaaaccttctctttcatcactgcaaacaact

SEQ ID NO: 2229 - DNA, 101 bp, Homo sapiens
tctaatgtaaaatgggtacaaggctgaaatcctacaacattctaacacttyctccttataagcatccatatatctttactgcaataaggtgtggtatatgc

SEQ ID NO: 2230 - DNA, 101 bp, Homo sapiens
agaatggtatgtatcggattgttttaatgttatatattggattgtattcgwtgttacaaaaccaatattctatggagaatgaaaaaaataaaggactaaat

SEQ ID NO: 2231 - DNA, 101 bp, Homo sapiens
taaaaatggttaaacctcaaatgagctgaaatcttttgtacaaagaacccrtctatcattgcttttgtccataaaatatatttaacctcaaccacataatt

SEQ ID NO: 2232 - DNA, 101 bp, Homo sapiens
tggtatcaaccactgcaaggaaggctgggaaatgctatattttagacaagyatattgcaagctcaaaacaaacaaacaacaacaacaaaagatcggacttc

SEQ ID NO: 2233 - DNA, 101 bp, Homo sapiens
gagcacctgaaccaaccaatcagagttcacctgcttgtgccaatcagagaycagctgtatcaaccaatcaaggctcagctgtattgaccaatcagggctca

SEQ ID NO: 2234 - DNA, 101 bp, Homo sapiens
acatctgtaaaatggggatgttaactgtatctacctcaaaggttgctgagygtatgaaatgaaataaagtagataaaacctaaagcatactaaatactcaa

SEQ ID NO: 2235 - DNA, 101 bp, Homo sapiens
tctgaatctcaggagaatgaagatcaatactttaattggcccatttcagaygtagattgttttaggctaacttttgaagtgactaaagcatattagtcaca

SEQ ID NO: 2236 - DNA, 101 bp, Homo sapiens
agatatctgttaaatgaatagactagaatctatcattgctaaatattcaaraaggctataaattttaaagtaatattctgcataaatgagcaacgaccaaa

SEQ ID NO: 2237 - DNA, 101 bp, Homo sapiens
aagaaataaatataacttacctaaaactgtcacttttctctttggttttcyaaatcttaactttatacaaattttcccaatttttgaagtgatttttctaa

SEQ ID NO: 2238 - DNA, 101 bp, Homo sapiens
tttgtgttacatctaccctatcaaatggtgggatcaaagattattcggatktaaattctctacttcaaaattatcttcaaattcaggtcacaacttaaatg

SEQ ID NO: 2239 - DNA, 101 bp, Homo sapiens
atctaaaccactcaagaaacaagcatgtcttgacaccatccagcaggagtmtatgttcatcagaagacaggtttgtagaaatagtgatggccatgttcatc

SEQ ID NO: 2240 - DNA, 101 bp, Homo sapiens
atgctgccaaaatattcctctttgacaccatgtttaccatatttcatgccracactccattcttttgacatatctttcttttaagtatattaatactgtag

SEQ ID NO: 2241 - DNA, 101 bp, Homo sapiens
aaaaagattcattgactaacatgagtgggggattaaagatataattctgtwttcagtcatggctgaatctacaattgaagtaatgccattagattgtctct

SEQ ID NO: 2242 - DNA, 101 bp, Homo sapiens
gtgaagactgccaggccatttcccctaacagctttgataattgcattttcragaaacacttactgttaggtggtgtgtcgaagtgttgcagttctcttcat

SEQ ID NO: 2243 - DNA, 101 bp, Homo sapiens
aataattttaaaaaggagttggctaaatcagtattagtgtagtgacaaagygaaagaaaagggtagttcagagatagaaaccataggaagaggccaccatc

SEQ ID NO: 2244 - DNA, 101 bp, Homo sapiens
ccaggactttgtaggaaataaaaaattgatctgttttaaattccctacaaytaacactactcaagatttaaaacgccggccctccagaacccatctatgcc

SEQ ID NO: 2245 - DNA, 101 bp, Homo sapiens
gaggatggaagatggtgaagaccaggcacaggccggattgtagaaaccacrgagtgacaggtgagtgaaggtggagtggggaagtgtggttccctggggct

SEQ ID NO: 2246 - DNA, 101 bp, Homo sapiens
tctagaaattacatcctaatgaaataatccaaaagtaagtaaaaatgctaygcacagagttgttcacacagtgtaattcgtaacaacaaaatattgggaac

SEQ ID NO: 2247 - DNA, 101 bp, Homo sapiens
tgtttgggttggtggcgtatttatccctagaattgctccgtgtaatttgaygatgaggacatctttctgtttctttcctccaaaatggaaggcaaactaaa

SEQ ID NO: 2248 - DNA, 91 bp, Homo sapiens
aaaatttttttttctcgcacgcctgagaaaggcaaccctagccttaagtartaagaggaacaaggtagagttgttccacttcctcctactg

SEQ ID NO: 2249 - DNA, 101 bp, Homo sapiens
aattacttttacaaaataattgttttgaaggaaatgggtaaataggtgacyggttagccaacactagtgtgattctttgttgttttgcaacagacattgac

SEQ ID NO: 2250 - DNA, 101 bp, Homo sapiens
tggtaataggtctactgtgggaacagttatccctaaccacagctcaaaatsgctatcatctttaggcaaattaaaatctatgtggcagtgctcatggatga

SEQ ID NO: 2251 - DNA, 101 bp, Homo sapiens
ttctccattttccccttgctggttttcttctcacttcccctttgttagaaytgtcctcttctctgcagatccttgctggggaggatagacagaggcagtgg

SEQ ID NO: 2252 - DNA, 101 bp, Homo sapiens
tcctgcaattttccaataggctgtgaagccataggcttcctctgttgaacrtctatccatccttcaagacaagatccatctccaatctgccctgttgaaac

SEQ ID NO: 2253 - DNA, 101 bp, Homo sapiens
tgtggcctctccctccatgacatttgttggttgaatgaatgaatgagtgamtaaatgcttgatatgagacaatcccaattggtgggaaagataagccaaaa

SEQ ID NO: 2254 - DNA, 101 bp, Homo sapiens
gctgctgtgcagccttgggcaagcacctgagtctctctgtgcccatttccrtttccttacgtctggggagtaagatctgctgcttgctcataaacatttag

SEQ ID NO: 2255 - DNA, 101 bp, Homo sapiens
tgtgtccaaattcattttcagagaaaaatactcaactttaagtcaagtatrtaatgacaaaaactacttcactgaaaacaaattggctaaaacaagttaat

SEQ ID NO: 2256 - DNA, 101 bp, Homo sapiens
atatacacttgatgacaattgccatttcctagtttatgaatagctagatgytaattatttggaatacggcagtcacaaagtggccagtgcttcctgagaag

SEQ ID NO: 2257 - DNA, 101 bp, Homo sapiens
aaagtccagtaagaatggagtagaaactcaagttgtaaggtagtttatagygagccattaacaatatgacaaagagaatggctttgcattattgagtcata

SEQ ID NO: 2258 - DNA, 101 bp, Homo sapiens
ggacatttttgagctgttttgggccaatggataaaaagcatatatcccagragaaaagctagaaggaagctgtctgagaaactgctttgtgatgtatgcat

SEQ ID NO: 2259 - DNA, 101 bp, Homo sapiens
agtggtttctcagatagcttccttttggttttctcctgggatactcgtttwtttgtctgtggcctcattgaactccaattatcccttcacagattgtacaa

SEQ ID NO: 2260 - DNA, 101 bp, Homo sapiens
cctgttcttcagcatcatgtatttaattattttgtgtttatttgttctgcmtgaaggaccgggcaaaacaatttgtactcccagaaaaacttaaaagtaca

SEQ ID NO: 2261 - DNA, 101 bp, Homo sapiens
ttttaatgtttctgagcctctgcttcctcattagaaagatggaaaataacracgtctactttgaatggggttgtgacatttaaataagccagcatatgtaa

SEQ ID NO: 2262 - DNA, 101 bp, Homo sapiens
aaaataggcagagtagatttagcataattcttaagggcccacaattttcartatggtaattaagcagtggcttaattttcagtatggtaattaggcagtgg

SEQ ID NO: 2263 - DNA, 101 bp, Homo sapiens
cagcttggaccaatgccgggtcgtatttttctactacctaggaaattgacrcattctttcacctactgatgtccacacacctccttgcaatgaaacactca

SEQ ID NO: 2264 - DNA, 101 bp, Homo sapiens
catgcacttccacatcattcccacctcacagcaatgctataaaataggtaygcttgttatcttcattttactgagaaggaaatgaaggcacaaagaggtta

SEQ ID NO: 2265 - DNA, 101 bp, Homo sapiens
tcttcccttgtgcatatgttctcaaattttcataatcaaaacttcatgaamatttctcaaggtgacatcattaatgattatccaacaccatgcttagatcc

SEQ ID NO: 2266 - DNA, 101 bp, Homo sapiens
cactttgacactgaaatcatatcttgctcatagtttagttccacaagctaytaagcaatgagaatcttgagaaaccctgaaaacgactggttctttgtggt

SEQ ID NO: 2267 - DNA, 101 bp, Homo sapiens
acccaatgtcccactttgtctagtgatgctaccatgattttttgacattaygtatgtttgaaatgttcttcccctaacactagctgtgcctgtcaaaagtc

SEQ ID NO: 2268 - DNA, 101 bp, Homo sapiens
tcagaagcactttgaagatgttgatgtcttattcttgtcttctctgcaaascctagttatcttgcttatgttgggtgcttactaaatatctattaagttgg

SEQ ID NO: 2269 - DNA, 101 bp, Homo sapiens
aatctccataaatgacagctattactgttgtacctgttatatgtgtttgaratcaggtgcgccgttcatcccatcagctgttcgtacatagcttcaactcc

SEQ ID NO: 2270 - DNA, 101 bp, Homo sapiens
caaagatgagagcatatgttgagttagtgtttcactttgtggccatattaktaccatctatttttgaaacaggtatgtccaggaatataaaatggaggttg

SEQ ID NO: 2271 - DNA, 101 bp, Homo sapiens
gctgagccagggtggtagggcagcctttgccttttgctgaaggcaatggtrtatcaccgtctctgccttgacttcaggccctcgtgtcaataatcagaaaa

SEQ ID NO: 2272 - DNA, 101 bp, Homo sapiens
acatctaatgggaatttttttatgtttcattcaaatgtcaaaacctcaatygtgtagaaatacgaaactggatgtgactgtttaggagatgttcgatggag

SEQ ID NO: 2273 - DNA, 101 bp, Homo sapiens
gctccgaattcacttagcactttcacatcttttgagtgtcacaatgttctkcctactaggtgcagggaattttaatttaatgctcattctgaggcttaaag

SEQ ID NO: 2274 - DNA, 101 bp, Homo sapiens
ttcctaggacagacccatgcagcaggcatctcagagtttagagctgggccrgttagcatttcctcctctattagatgaggagttcagccaacttaaagaag

SEQ ID NO: 2275 - DNA, 101 bp, Homo sapiens
ggttgctccagcagaagtggcgtgttctttacctttatgtctcctgtagcrcgtttaaagggatcaagaaatgtttgtcacattaaacttcctggattttt

SEQ ID NO: 2276 - DNA, 101 bp, Homo sapiens
ctttgattgtatgtaagaaactattgaggattacaatgttcacaataaatstcaaatgaccagcagggctcttcacagacagacagacaaacccacactgg

SEQ ID NO: 2277 - DNA, 101 bp, Homo sapiens
ctgaccctgagggccacattgtctctctccctctcttctatgcaggaagcrgcctttagagagtaagcaaacaaatcagtcagtgtgaaatagtaaatata

SEQ ID NO: 2278 - DNA, 101 bp, Homo sapiens
gtagctttgtgccttgcccagggccatacagctgatgagagtagcatactrattcaagaaagggccctcttgggcccctactttattatctgcatcttaag

SEQ ID NO: 2279 - DNA, 101 bp, Homo sapiens
ttgatgaagtgggacccttcccccttcatgcttactgtggtaccaaattgrtggatgtcgaagatgcagagcatgtcagcctatgagcccacatcccccaa

SEQ ID NO: 2280 - DNA, 101 bp, Homo sapiens
gtttttaggataaaaaactggaagaaacttcaaagcccacttcattcaatstcttcattttgcaagggaaaaaaccaaagttcagggaggttagtgtttgc

SEQ ID NO: 2281 - DNA, 101 bp, Homo sapiens
cttcagggctggattgtgacgtgtatcttgtatttttttcccagaaacctsacgtcttagatgctgctgagaaatgatgtcatgactctgtggagaatata

SEQ ID NO: 2282 - DNA, 101 bp, Homo sapiens
ttttttggatggctttagcgggggactggaggtagaaaaccattaggagamcactgcaatagtccaggcaagagacaaagggcagaaataataccactagc

SEQ ID NO: 2283 - DNA, 101 bp, Homo sapiens
ctctactccttatccctcgtttttgcctttctcatcttgctttgttcataygtagcacagttgaaatacacttattgaaatctagtacagagtgatgccta

SEQ ID NO: 2284 - DNA, 101 bp, Homo sapiens
ctacctatgttccccaaaagtcatatgtaagaatgctcatggcagtaccaraaacaacccaaatgctctttatacaatgggtaaaaacatggaggtagagt

SEQ ID NO: 2285 - DNA, 101 bp, Homo sapiens
gtctattctaatcaggcaaagactctatggacaacccatcctattttataytgacactacaaagaagatgctgccagaattaatgttataaagaagtacta

SEQ ID NO: 2286 - DNA, 101 bp, Homo sapiens
ccctcagcaagaatgacttggagctggaataaactttttaccagtgaaagmgctaattctaagtagactcaaggaaaccctgaaaatagcaggcaaatctc

SEQ ID NO: 2287 - DNA, 101 bp, Homo sapiens
tttttatcagtgatcccatcagtgctagtagttgtggtaggtggctcagasaagttcctaaaaaggtagggctgtcgtaggtggctgacattgcttgtgga

SEQ ID NO: 2288 - DNA, 101 bp, Homo sapiens
ctgggaatcactaattttcccattcctggaaagcctggttttctacttaaygcaatttatgccaaacctgcaaacaaacaggaagatgaagtgatgagagc

SEQ ID NO: 2289 - DNA, 101 bp, Homo sapiens
gaaagttgtcgattgttactgtagtattaactgacctatactgattgatayattctgttttagactgactgtattgtaaaaattctgtttatatgtttgtc

SEQ ID NO: 2290 - DNA, 101 bp, Homo sapiens
cactttaactactgtatctttcttgacttactcctttttagcttctccaayattcttggtttatttcctgttcttcagcatcttggtttttcttcgtattc

SEQ ID NO: 2291 - DNA, 101 bp, Homo sapiens
ttatgggatggtaccgagcattccaggtatgactggaagctggaattcacytcctattgtatactctactcttacacatatctcaagctttcagtcaaaat

SEQ ID NO: 2292 - DNA, 101 bp, Homo sapiens
gtcactgggaatgtcattgtattctgaacttgccacctgattcatacacartgacaacgggagagtgaggggcaaaagaccaagacaaacccatcttcaca

SEQ ID NO: 2293 - DNA, 101 bp, Homo sapiens
acatgtggtaagggcatgtatgttcatatggctttttctctgtgaagatgrgtttgtcttggtcttttgcccctcactctcccgttgtcattgtgtatgaa

SEQ ID NO: 2294 - DNA, 101 bp, Homo sapiens
aagctggaaacaagctagctatccattacagttgttgggttgagagatgaygatggtcttaacgagttgcagtcttacagtagagttggtaaatcctgact

SEQ ID NO: 2295 - DNA, 101 bp, Homo sapiens
tggctgatggttgtcatacactgaaatagaaggccattgttattgtccagrtaagagatatttaaactgctgtatagcagaagcggtagggatggagatca

SEQ ID NO: 2296 - DNA, 101 bp, Homo sapiens
acattatttctgaaagcttgagatttcaagctgggccttttattcacattstcttgctagttttagttttacttgtgacattcatgttattagaagaatga

SEQ ID NO: 2297 - DNA, 101 bp, Homo sapiens
ctacactgctttccttccagttagatagctgtattgtttttttaaaggaargataacaatgccttgtgaaaaattttggtgtgttgtgattgaagaatatg

SEQ ID NO: 2298 - DNA, 101 bp, Homo sapiens
atcagaaagtaggcattgttaccctcatcacagatgaggaagtgaaactcrgataaattaaattcagatcacacagtgggttagtggttgtgtcaggattt

SEQ ID NO: 2299 - DNA, 101 bp, Homo sapiens
gacagatttatgaagaaatgctgaaacagtcaactctggaaaaaggagcaytttctaaatatgagaattatgtaaaatacatgataaatattgttgggtgg

SEQ ID NO: 2300 - DNA, 101 bp, Homo sapiens
ttttagactttgggggtcatatggtctctgtcacaattaccaaacttcacyatgatagcacaaaagcagccacaggcaataggtaaacagatgagtgtggc

SEQ ID NO: 2301 - DNA, 101 bp, Homo sapiens
cagtaggaggtaaacatttgggagttatcagtatgtgcatgatactgaacrgtaaataccaagggaatgagtataggtggaaaagagaagcctacaaagga

SEQ ID NO: 2302 - DNA, 101 bp, Homo sapiens
agcagaggttggtcatgaggtttaaggaaagaagccgtctccataatataraagtgtaaagtaaagcagcaagtgctgacggagaagctgcagcatgttat

SEQ ID NO: 2303 - DNA, 101 bp, Homo sapiens
atgcacatgtagatgtgccgtgtaaagaatacttataacatgatcatctcragaaattggagtattgttggcatcccagaaatcatatgtgtatttctttg

SEQ ID NO: 2304 - DNA, 101 bp, Homo sapiens
atacattattctgcatcttgctttttcatttaacagtatgttctgggaatygctccatatcaatagagatctttctcatccctttctacagctgcacagta

SEQ ID NO: 2305 - DNA, 101 bp, Homo sapiens
ggcccctcaggtggctgccaaggctctctttcttgatctggatggatttargagtgtttcctttatgataattcactaagctacacatttgtcttgtactg

SEQ ID NO: 2306 - DNA, 101 bp, Homo sapiens
acttttaatggcaaaaaccacaattacttttgcaccaaccaaacaggtgtkaaattgactcatcgagaatatttccccaaatatctgttacaaatcaaagg

SEQ ID NO: 2307 - DNA, 101 bp, Homo sapiens
agtcaaaagctttcaagtaatatcaatagaggtagtgattgacctctattrtataaacactgatttgatcattgtggactatgatcaccatagtccttagg

SEQ ID NO: 2308 - DNA, 101 bp, Homo sapiens
gttatttaataggaaaaattcagaaaaagaatatattagcataatttgagwgtctaaaggcaagaaagttgcttgattttaaacctcagtgaataagtgtg

SEQ ID NO: 2309 - DNA, 101 bp, Homo sapiens
cacagaatctcacattgctaaaactaggagagaacttagaaattatccatrgagaaccttcattttagagaggagaaaataggtcccaagatgcaaaacaa

SEQ ID NO: 2310 - DNA, 101 bp, Homo sapiens
aatattgctataattctgttattattagctgctgttattactctctaccaygtgaatggaaaaaacacaattcttttgaaagactagagtttctttttaga

SEQ ID NO: 2311 - DNA, 101 bp, Homo sapiens
tgttattagtgaggtagtaatcatttgctatccatgcccacagtagacaasacaggagcaaacaaattaaattacatcaggaaagatttcaattagacata

SEQ ID NO: 2312 - DNA, 101 bp, Homo sapiens
caaggcatcttcccaggcccagagagcttccatggttctcttctttccctwtgatgcaggctttcagacacagtctccttcctcctcctctcaggaacagc

SEQ ID NO: 2313 - DNA, 101 bp, Homo sapiens
tcatcatacttacacagtaaacatgcatacttgccttatctgactaaaaaygtttctcaagaggataaactataccttgttcatctctagatccctagctg

SEQ ID NO: 2314 - DNA, 101 bp, Homo sapiens
tttgtctctctgggttctcctggaaacaggaacatctgcttttctatgagytatactgtaaattgagccttgcttttttctcggttaattttttcctacat

SEQ ID NO: 2315 - DNA, 101 bp, Homo sapiens
caagttattgattacaaaatcatgctgggttttaccactttggattctackgaaaggctacactttacctctgacataattttcttttttttttttttttt

SEQ ID NO: 2316 - DNA, 101 bp, Homo sapiens
taagcgacaaacaagtactatttcctggacacagtaaaatgcataaacttrtagtaacatacccagtcacagcaacaagggtgatttgcatatggtgggtt

SEQ ID NO: 2317 - DNA, 101 bp, Homo sapiens
agaacacgtagggtaagagaacaaattttggtataacacatcaagaacacyggaaattatcagacatgttctttgctgagactagataaaataatgcttta

SEQ ID NO: 2318 - DNA, 101 bp, Homo sapiens
tattacctcaagcttactactaaaaagaaagtctactgtcataaattattmctagctccaatcatattgtcagtctaacagtgttcctactattattttca

SEQ ID NO: 2319 - DNA, 101 bp, Homo sapiens
tgaataggttgtatgtattattaggagatttgtaaaactaactgcttgccrtatctttatgcttatatataaattaaaagagcatttagaaagctcattat

SEQ ID NO: 2320 - DNA, 101 bp, Homo sapiens
gcttagtacagagagccatgtagagatatgatttgacaaaaagtgtatgayttaatgctggcagactgagtggggaaacccagtgaggcttgtctgtctct

SEQ ID NO: 2321 - DNA, 101 bp, Homo sapiens
ctgttagaatgagaggcctgaaaggaacctgggtcgtttatttaacttacygctaatctcaatgtctcagttaccttgcagtgagaaagccatgctgtttg

SEQ ID NO: 2322 - DNA, 101 bp, Homo sapiens
tatttagggatgctgcaagtgattcaagatagttttgctggtggagatacmatttttttaatctaataattccggaatggatacttacagatttatgtctg

SEQ ID NO: 2323 - DNA, 101 bp, Homo sapiens
tgtacaaaatttgtgtactctgtaatttgtgtacgactacaggtattcttrtacttatgcattaacatttcttaaattctgaaaattaattatttaacatc

SEQ ID NO: 2324 - DNA, 101 bp, Homo sapiens
gctatatatgaaaaaataacatacctcagtataattcccaaatttagatcytttctgctgtactgtgctgtttggccccacatcaattaccagttctcctt

SEQ ID NO: 2325 - DNA, 101 bp, Homo sapiens
gatggaatgaaagcaattcaattattttcatatctggttacttagcactaygtaaatctccttgggcctattgtattccagaaaagcagaaattccattac

SEQ ID NO: 2326 - DNA, 101 bp, Homo sapiens
tgtatgtttaaaaagtattttatttaagttcttaggctaatgtctcaggcytaatatgaattctttatgcatattatcacttcaaattttcaaaacaattt

SEQ ID NO: 2327 - DNA, 101 bp, Homo sapiens
ttattgtatttacggattatttgaaggtgacataacttttgtttggaaccstgatcaaagatgatcatatcccgtatccataaactaattcttacaccact

SEQ ID NO: 2328 - DNA, 101 bp, Homo sapiens
cgtgtctgtggcctggatctgtcataaaacgagtgcatgacaaaacctgaytacttctgacatgtccagcatacattttaagcaaacaactttactcagtt

SEQ ID NO: 2329 - DNA, 101 bp, Homo sapiens
tgctcttgacagagaaagctgtggcctgaatactaagaaaacccagtatgygaagatctagtagaagattattcacagtggagggaacagtatatgtgaag

SEQ ID NO: 2330 - DNA, 101 bp, Homo sapiens
catcctaatattggtacagaagacaatgaactgatgtgacactcatcttcrtacctaataaaagcctgccagttctgcgccttccccaatgtttccagcag

SEQ ID NO: 2331 - DNA, 101 bp, Homo sapiens
tcttatagtttccttctttttcccataggaaggaaggggaaaatcacagartaaaaccagatgcttttgtaaattgatgaagatgtttgctgcatgtggct

SEQ ID NO: 2332 - DNA, 101 bp, Homo sapiens
aatacaatatgtgtaggaataaatgctatttcagccatctatcaatgcaasaggacagagaaattatagtggtcttaaatcaaggtgagaaaatcaaagag

SEQ ID NO: 2333 - DNA, 59 bp, Homo sapiens
taatcgcaagatctcaatacattttcactgttaataacagcaataacctcrtaatgtgg

SEQ ID NO: 2334 - DNA, 101 bp, Homo sapiens
attaaatttagttcatcttggtttaaaataatatattaatctaagacttcrgaaagaaacaaacccacaaataatactattaaaaatcccatctagatatg

SEQ ID NO: 2335 - DNA, 101 bp, Homo sapiens
tttttctggttagtgattggctcaggaatgaacatgtgacttgaattcacrcaatgagagtcacttctcagaggtctgggagaattatgagtaaagtgact

SEQ ID NO: 2336 - DNA, 101 bp, Homo sapiens
caggtttgccttaagcagttcccagcttgaaagggcccaggatattttcckttcacatttcttagacagcccagactttatacccacaaataggctgcccc

SEQ ID NO: 2337 - DNA, 101 bp, Homo sapiens
ggaggagagtgttttctcacaaattagcacatcccagaaaacacgtggaasaaatgaatccagagatacccagaacatctgcagtgaagcttgtttagaaa

SEQ ID NO: 2338 - DNA, 101 bp, Homo sapiens
gagcagtgaaaagtagaggttgcccatgtggattcccaagtcagatagatrtggattcagatcccagctctgctgcttgctacccaagagaccatggactg

SEQ ID NO: 2339 - DNA, 101 bp, Homo sapiens
tattagatttttaagtggtgcaggccagagaggctgaatagaaagtgtaawatgtagaataggtgagcagagattttagtcatctcacagtgatggcgaaa

SEQ ID NO: 2340 - DNA, 101 bp, Homo sapiens
aacagagtgagactctatctcaaaaaaaaaaaaaaaaatcataagagacastactttcaggaatataatgctagttaattctagagcatagtcactacttt

SEQ ID NO: 2341 - DNA, 101 bp, Homo sapiens
tactatgcaaatgctacgactatggctgactttaaactactaacttgacawcacagaatatggggctgggaagataatgcacttcacattagcacatggtc

SEQ ID NO: 2342 - DNA, 101 bp, Homo sapiens
atgggactggagcagagtgtggggttgaaaatgaggtcagaaggatgctayggggtcagagattacagagcgccttgtagatcaccgcacagactgtggta

SEQ ID NO: 2343 - DNA, 101 bp, Homo sapiens
tcttaaatacgaaattcccacaactggaatatataccgcattgatactatyttcccctttatcctaaaactgtcatctttaagcttcaaacagtactgtga

SEQ ID NO: 2344 - DNA, 101 bp, Homo sapiens
tgacttaagtgaactaaagaaatttgttagaaatgttgacaagataaaagygttttgttaatttaatcttgttaaaaaataaccttagtaagcaaattaaa

SEQ ID NO: 2345 - DNA, 101 bp, Homo sapiens
ttgaatgagtccattaaacaaggcaaacttatgactggcctgaaaagaagrctatatcagagtttagaaaaaaaaaatacatgcgcttatctatttcttat

SEQ ID NO: 2346 - DNA, 101 bp, Homo sapiens
taaaaccccattttgcttcctggacctaaccaatagactgtgagctgcatyggtcaataacaattaacaagtttgcatgcctcatttgtataagcagacca

SEQ ID NO: 2347 - DNA, 101 bp, Homo sapiens
ctacctagttgccccagcacatttatttgtaaaactgtccctttcctcacrgtattgtggtatgacatttctcaccaatcaaattaccccgtatgggcggg

SEQ ID NO: 2348 - DNA, 101 bp, Homo sapiens
gtattcactttagagaagatctgcaagttgtgaattcccttagcatatgaytgtctctattatatgctaaaagaatatgatagaataaataaaagaatatg

SEQ ID NO: 2349 - DNA, 101 bp, Homo sapiens
gagatagcctcaaatcttttcactttagtaataaagctttgttgttctatygcatttcaagtccagctaaagcaccaacatgagctaagtgcatcactctt

SEQ ID NO: 2350 - DNA, 101 bp, Homo sapiens
agtaaacgccttttccttgagattcagggacactaccttatatagttgagwcatctttcatgagctctcctattctgagcagcaatttccagcatacttca

SEQ ID NO: 2351 - DNA, 101 bp, Homo sapiens
aataggtattttgaaggtgcatgcatggctgcttcaattattaagataatsattgcttcaagacacagattgggctgcacataaactcataagcacttgaa

SEQ ID NO: 2352 - DNA, 101 bp, Homo sapiens
agagccattcaaattcaggggcagcctgttcttcaatcattccttagtacytaaatatgcagttcacttccctggacgtcaggatgctaatttcagaaata

SEQ ID NO: 2353 - DNA, 101 bp, Homo sapiens
ttatcattggattaataacaacgagagcagctacttctgggtatcatcagktctctcctttggagatagtaacaggcaagattatatgtcttgtgacatca

SEQ ID NO: 2354 - DNA, 101 bp, Homo sapiens
cagttccagatccataattgaaatagacatacttagctactggcataatcmtcacgtggtttccctaacctgtggagtgaggtcctttatggtggaaaatg

SEQ ID NO: 2355 - DNA, 101 bp, Homo sapiens
ctccaattcaggaaaatactactgtgctgtaaatatcccttctctttattycttgtagtcaacaatagcaccagttttgaacctacactcagcagctctga

SEQ ID NO: 2356 - DNA, 101 bp, Homo sapiens
aacccaaagcttaaaaattaagttaaattaggcctgagtaagtatggagcrtaagtagccaaatagaaataaactcacatacttacttctaaatcaaaatt

SEQ ID NO: 2357 - DNA, 101 bp, Homo sapiens
cttctgaattacttttgggtaaacaatgaaactaaggcagaaatgttctakgatatgagtaaaaagaaagacgttgcatctgaaatcactcggattcagca

SEQ ID NO: 2358 - DNA, 101 bp, Homo sapiens
gcataaaaaagataaataagaagtttcacacagctgctgtttcacaatttyggaaaagttacttcatgccaaggtcactgcgtatgaaattactggcatct

SEQ ID NO: 2359 - DNA, 101 bp, Homo sapiens
agagcaacccaagtcactaagagattgtaaaatgtaagactaattctctaytccaaagttgaaatttagatcacattttatatgttccagatgagtgattg

SEQ ID NO: 2360 - DNA, 101 bp, Homo sapiens
gcaagaatacttcctaaggccctagaatggttcctagaattgttttcacayggtcatatatttttgtaatatgtgacaattcaaattaattttgtagtctt

SEQ ID NO: 2361 - DNA, 101 bp, Homo sapiens
ttcagtgtcactggactttctaatcttactgcttaaaatgagaatatactkcagcaaaatatgtaacatttccaaatggtaataaaaggcatctagaatct

SEQ ID NO: 2362 - DNA, 101 bp, Homo sapiens
gcattttccatgaactttgtgaagacctcctgtatatgtggtccacccttsactaaaatatcattatgaggcacaggactgtatatgtctgtatgtatagg

SEQ ID NO: 2363 - DNA, 101 bp, Homo sapiens
ttattttatgtgcatattggtcattaacatacctttccttgcaaaatatcwgtgaattattttgttcattttttattggaagtttgttttgttgtagttta

SEQ ID NO: 2364 - DNA, 101 bp, Homo sapiens
catagactctacatctacccctagatagaataaaattgaggcatacatatrgataggtttagataaattgtcttgaatttccttattttttcagactataa

SEQ ID NO: 2365 - DNA, 101 bp, Homo sapiens
aattgaggtgtattaatcattcacaacacgttactcttttttttgaaaacktgagccagtgaaataaatattattagtattctgaagaagtgacaaattca

SEQ ID NO: 2366 - DNA, 101 bp, Homo sapiens
tgtccaacttattgtgtgctcactatgtgtcagtcatatggtacagctacrtatctacaggattctactggagagatggagttaggagttagtaaagacaa

SEQ ID NO: 2367 - DNA, 101 bp, Homo sapiens
agtttatttatgtgtgagattaaaactacatgaagtttctggaattataayggttcccagaattacacattttgtgataaaattagtggttctaaagctat

SEQ ID NO: 2368 - DNA, 101 bp, Homo sapiens
atgatcctatacatatttatcaagtattagtatgtgcagggctatgtcttygttgctagagatacatcttgtgactcaccaattctctgtcctcatggagt

SEQ ID NO: 2369 - DNA, 101 bp, Homo sapiens
gaaaaatgtataaaacctcatcaaaaatgatggctctctaatcagtatccytgctatacattgtaaagggacattaagtatccacccagcctttagaggtg

SEQ ID NO: 2370 - DNA, 101 bp, Homo sapiens
tatttttcaacctacccaaagcaattttctcttttcagtaagttatgctgygcttatttacatacgatcattatattccttgccaagataatgtaaatatg

SEQ ID NO: 2371 - DNA, 101 bp, Homo sapiens
tgttctttgtgtctacacaagagctacccaagtcttcttacatcaaatccyggtaagatcaaatacaaaactcgtgaaaaatgaatactgccactgaaaag

SEQ ID NO: 2372 - DNA, 101 bp, Homo sapiens
ttcaaagtgctttatgtgtattaacccttttaattcttaaaacaagctctygagtgggtaccattgtgaggaaaccagggcagaggtgtgtaaatatctgg

SEQ ID NO: 2373 - DNA, 101 bp, Homo sapiens
cagaaacatgcctgttgtttaggtactgagatagacattctgactctatgkttcaaaacctgggttccctggatctctgtgtaggaaccaggtccttaagt

SEQ ID NO: 2374 - DNA, 101 bp, Homo sapiens
agaggacggaaggaggcaggtaggcagacgaattggactcagataaggaascgtttacttctcagtatttcctaggaccagttttaacaatatcctttccg

SEQ ID NO: 2375 - DNA, 101 bp, Homo sapiens
ttagcaaaacttacctgcatagatgcatagagtacatttttaacctcttgrttcctcagatcgtatactttttctttgctgagattgctgtcccttgctaa

SEQ ID NO: 2376 - DNA, 101 bp, Homo sapiens
ttcctcatattttctgctagaaatgcctttgtcttctttccaacaaagaartggtttaatccttcaaagcctgagtcagaaatatccttcccagtatcttc

SEQ ID NO: 2377 - DNA, 101 bp, Homo sapiens
attttccctggccccaacacttggatcgtggtgtcagattctctctacttrgtaaccctgtcgttcacactgatcatctgtgtcctagggagacctataag

SEQ ID NO: 2378 - DNA, 101 bp, Homo sapiens
cttatatgtgtataagtgttttacatataaataagtttgcctatacctacytaatcaataattataaaaacttaagtaaatgctaaggataaataattttt

SEQ ID NO: 2379 - DNA, 101 bp, Homo sapiens
gaagtgaaattgtattttaaaggactctccaaaagatagtatagcattcamtaggtagcaagtgggacattttatttgccatctgctaaatatatttgcac

SEQ ID NO: 2380 - DNA, 101 bp, Homo sapiens
cttacagaaaggttggtccataggatctactcaggaaaatgaaagtatatygagaaaaaggtacaaactgatataaaaatggaaggaattaaaacaaactg

SEQ ID NO: 2381 - DNA, 101 bp, Homo sapiens
ttctctgttccttttattttcacttcccttgtaatgttagtctcttcgtaytgatttctgaagagttcatttatgattaaagatgttaaacttttgtctat

SEQ ID NO: 2382 - DNA, 101 bp, Homo sapiens
gagttcatttatgattaaagatgttaaacttttgtctataattgcaaataygttttatctcattcattttactgtggtgttttattttttggttatacaga

SEQ ID NO: 2383 - DNA, 101 bp, Homo sapiens
tccagtctgttttttagtccttttcttactactttctaaggcataataaaygtaactactggaataaatgtatcaatgtcaactttgaaaatttttaacta

SEQ ID NO: 2384 - DNA, 101 bp, Homo sapiens
gggatacatactggtgacaaatacttttaaagtagcataactcaagtaacrcaagtaactctcgccagccaagtgaaaattgtaggtggaaatctcacaat

SEQ ID NO: 2385 - DNA, 101 bp, Homo sapiens
tgaaaacatttactaagtatgtaatatttgccagatcctaagatagatgcyaggaatggatacaaagaacagtttgttcattataaactcaaatactgctg

SEQ ID NO: 2386 - DNA, 101 bp, Homo sapiens
agtatcaccagaagatactctgaaactctcaacttggtcaaatgtataacwtaaaggaaggatggaatttggaattctagctagctctctagatttctagt

SEQ ID NO: 2387 - DNA, 101 bp, Homo sapiens
ttgttgccataattgtttggcaatttaaatgcatccagatccagtttttgrgaaattgttgctcctgcacattgggacttctgtggcccacactgctaatg

SEQ ID NO: 2388 - DNA, 101 bp, Homo sapiens
aacagtgcttggcacatgtaaatgtttgtattaatttctgagtcatgactraactccataatgattatcccattatttatactcagactttacatatgcat

SEQ ID NO: 2389 - DNA, 101 bp, Homo sapiens
gaatttcctttaagccatatttgtgtaaatgtgctattaaaagttattccraaattgtataagattcctaaaattcggatatgttggggtatatgtcatga

SEQ ID NO: 2390 - DNA, 101 bp, Homo sapiens
ctctataaacctagttaaactctaattttggatgacctatctaaatattgrtgtgccatactttcagcttattaatggaaaaatagcctacttttttctcc

SEQ ID NO: 2391 - DNA, 101 bp, Homo sapiens
agttccatagttgtaattttttgtttcagctcattcgcaccctatgacttyggtaatttttatactgcaaattagtttaggcctgtatgataacaccagtt

SEQ ID NO: 2392 - DNA, 101 bp, Homo sapiens
actttggttcagactggaaattacaatttgtttcattcttggtccccaaayagtttcagcttgcctatagtctctagatatccaaggcagactgtcaaatc

SEQ ID NO: 2393 - DNA, 101 bp, Homo sapiens
agctattagtttatagtcccttttttgtcatctaataatcctagtaattayagaaaatacggcaaactcatcctagccctgctgctcgtatgtgtgcatgt

SEQ ID NO: 2394 - DNA, 101 bp, Homo sapiens
cctgtctcaggaagaacaggataactactggcctcatctctcataagcaamcaattatttctaagcttatgtaaggccaagagcagaccaggtctatcaga

SEQ ID NO: 2395 - DNA, 101 bp, Homo sapiens
aagttgttaatgttctgtttggaaatgtaataattatttgtattagctcargtaggtagaaataaactaaaagactttatatttctctccactggcaaacc

SEQ ID NO: 2396 - DNA, 101 bp, Homo sapiens
ctatatatatatgcatatgtatgtatgtattaagtagagatactatactaytagcctttgctgcatgtatatacatactacactaggtatatatactacac

SEQ ID NO: 2397 - DNA, 101 bp, Homo sapiens
ctaaacttggtattaggaacatctttctgggaaagagacaatttacctacrgactaccaataccttctatatatggcagagatatgcttctaacccaggat

SEQ ID NO: 2398 - DNA, 101 bp, Homo sapiens
caagaattcagtttaatttacaatcgcaaatatttctggtgggctaacttytataattgataagatccagagaacaagtgtttttaaaaatctgttcattg

SEQ ID NO: 2399 - DNA, 101 bp, Homo sapiens
ggaccatagaaaaaaactgagataattttagaagttttgcagctgttactktaaaaagactttgcaacgattatgtcacctggcattactgaaaatattag

SEQ ID NO: 2400 - DNA, 101 bp, Homo sapiens
atgttgagtagacaattcccagaatttgaataatggtctataacctctaaytgccagacatttgccataccagttttatggtggtcacaagtgttttgata

SEQ ID NO: 2401 - DNA, 101 bp, Homo sapiens
cgtttgtcttgcacgccacagattttggtacttttagtgttgtccctgccrttatttacgagagggttaactgcagagcctacttagttttgctggcactt

SEQ ID NO: 2402 - DNA, 101 bp, Homo sapiens
aattataatagagtattcatgataaaaatatgtgcaaggttttataaaggyccttcacaaaagcaggagatgtaaagaaagaattccagaagaagatacca

SEQ ID NO: 2403 - DNA, 101 bp, Homo sapiens
attcttccatagccacatcttgctctgacaccagctggcaacagctctcarcatttaaggactcaattatattagacccactaattgagttaatcttccca

SEQ ID NO: 2404 - DNA, 101 bp, Homo sapiens
atgaagatggtccttgcttgtaccttcgcatagcacttggcatcaatccaygaagaacagtacctacagccagagtttctgttgctgacatctttttctct

SEQ ID NO: 2405 - DNA, 101 bp, Homo sapiens
tgccctgaaaagaaaattcattgcttacaaaatctctactatttctcatgwatgtggatttcacaatctgctctcatagtttcatgttttttgttcagttt

SEQ ID NO: 2406 - DNA, 101 bp, Homo sapiens
aagggtcacagtttctgattgttattaaaaacatgcactgaatgaaaagtytgagagatgtctaaggccctctggagattaaaaagaattataataaaaga

SEQ ID NO: 2407 - DNA, 101 bp, Homo sapiens
tctctctggctgactgtggccagccaaaaagaggcaagaagctgaatcatrttgagcataactacacaactcggtacttcagtctggctgcccaatttttc

SEQ ID NO: 2408 - DNA, 101 bp, Homo sapiens
tggggttttgtgcatggttgttattgtttgtggttcttattttgatacacracctttatcaatttagagattaggatgccacatttcaaatttccttcgcc

SEQ ID NO: 2409 - DNA, 101 bp, Homo sapiens
ttcggtactttatgcttttggggaaaaattgaatatcttaaaattctaccytttacactacatgcagtagttattagtgaagtcaacatattgtgtgacta

SEQ ID NO: 2410 - DNA, 101 bp, Homo sapiens
atggtatgatttaatatgtttaattttactaccatcatattctgaggatamagattaaggatttttgttttattttctccaacgtttgttatttttcagta

SEQ ID NO: 2411 - DNA, 101 bp, Homo sapiens
agtccttgtaacaggcactgcatagcacacaaggagtgcaacaagttactrtagtccacataggcagctggcaaaatgaggtagggtatccacaactgcat

SEQ ID NO: 2412 - DNA, 101 bp, Homo sapiens
tgagaaatgttttaaacagagattactggcttctgtagtgaatatatattyctctttgttcagttatatttttgtacttcttcccattggcctagggtact

SEQ ID NO: 2413 - DNA, 101 bp, Homo sapiens
ctacctctggctagatggatgccattaggccacttactctctctccattcrtcttctcttctttttcctgtgttggctttaatttcaggccgtattttcct

SEQ ID NO: 2414 - DNA, 101 bp, Homo sapiens
taagtatcatggtccagcagtactgtttaatggggtattcagtgactaagrtctgctatttatgcaaaattctgtttatcccgtgttaccaaattaccatt

SEQ ID NO: 2415 - DNA, 101 bp, Homo sapiens
gtcctgatatacccgtaacttctttctgactccagacctttgtcttctacmtaaaatagtcttctttcatatcaccctttacattacaaacatcttcccac

SEQ ID NO: 2416 - DNA, 101 bp, Homo sapiens
cacacactttttgactgataacaaccacagtagtgacctgtctttatgatytcccacaagattttttttttctaccaattttcaacttcaaaacttattca

SEQ ID NO: 2417 - DNA, 101 bp, Homo sapiens
ctttgtactttgtggttgtcttttgccataaagctttccttcactgttaargcaaaattactttttgtacattggaaattactgggaagcccctggggggc

SEQ ID NO: 2418 - DNA, 101 bp, Homo sapiens
cagaatgcccatgtctgaactgttagtatttctttccagaatggccatttsttacacttcccctaccttggctaacaggaaaatcgttatctactcagttg

SEQ ID NO: 2419 - DNA, 101 bp, Homo sapiens
tccagctttcaaatctctccaagttgattaatcattttcttgttctgactyattcaggcctctagaaaaatagctgtaggtactggaagggctatgtagat

SEQ ID NO: 2420 - DNA, 101 bp, Homo sapiens
tctccagtgagctaggatgaatggttcctgatgcaggactcatacccagayggtctagccctcagacaactttgagggatcccctccagtctccaaactga

SEQ ID NO: 2421 - DNA, 101 bp, Homo sapiens
catgactccatgtttggaaatatttggttccaggtaacaatttgccttctyattgaataggaaaaatagaaataattgacaagcagagttcctgcctgggg

SEQ ID NO: 2422 - DNA, 101 bp, Homo sapiens
cgtgagggacaccactcctttttttgactaacacagtgttaatagaagccygtttaagttgtaaatgtttaagcaaatttggagtcaacacggggttacaa

SEQ ID NO: 2423 - DNA, 101 bp, Homo sapiens
gtcaatgctaaactgtgtagaagctgaagatgttgacgtattttctgaacycttactaattgcctccatttttattagcaatttaccttaacatataaatg

SEQ ID NO: 2424 - DNA, 101 bp, Homo sapiens
attttgtttagaaagtcttacttcactcctatatcacaaggtgttacactrtcttttcttctgttaaatttgttgtctgacttttcacttgtggaccttta

SEQ ID NO: 2425 - DNA, 101 bp, Homo sapiens
atggattctatccttttaatgaaggcttttagctgattgtaggtatggtastgttattgcaattctgctcttaactatgtatgccagagaactcttaacaa

SEQ ID NO: 2426 - DNA, 101 bp, Homo sapiens
ctcacttctatcacaccccattaagccagaagtaagccatatagccacccrcaggtttgaggaattctagaaaataaggagtcttcagctagataagcata

SEQ ID NO: 2427 - DNA, 101 bp, Homo sapiens
acgtatacccttctttataaattaaacacatgtattgttaagcatgtgttkttatttatactgagctgagttaaccataaataaaagttctagtgtttttt

SEQ ID NO: 2428 - DNA, 101 bp, Homo sapiens
aagtcagggacttagacctgtcttcttagcttgctttttcagactttaccmaataatatatcagctatcgggggatggaggatggtttttagcaccccaca

SEQ ID NO: 2429 - DNA, 101 bp, Homo sapiens
aggctcttacttttaagggcgggatgagaaaatcaaggctgtaggaactgsaatagctaaccaatcaggtgagctctttgtgcggctttgcttatggctta

SEQ ID NO: 2430 - DNA, 101 bp, Homo sapiens
tcatatattagtatcaataaaaatgtccttcaacctcacctttgaatgtargctgttaagtctgaccacaactattacttaaaactgatgaagatgagtac

SEQ ID NO: 2431 - DNA, 101 bp, Homo sapiens
gatatgcctcgggggaaaaaagtattgtgtgctcaagtgagtttgagatayactgcattaaatataagaagttgccttcaggacttctcagagtctttaac

SEQ ID NO: 2432 - DNA, 101 bp, Homo sapiens
agagaacaggaactatgtctttcacatttatgtcgtctatagcacctaacrtaattattgctacacagtatgttgctacagggagtcttccgtggcctaga

SEQ ID NO: 2433 - DNA, 101 bp, Homo sapiens
gaggacccagctacactgtggccagactcctgatccatagaaatcatgggytaataaatatatgctattttaagccgctaaatttgtaatttgtaatgtga

SEQ ID NO: 2434 - DNA, 101 bp, Homo sapiens
tattatacattctcttaaatccattactaaataagtctgggaacagttcayttaagcgtgatgttttaagactgctgtattactagaccctagaagcttta

SEQ ID NO: 2435 - DNA, 101 bp, Homo sapiens
ttggaagcttctgggaatcatgagctgaggttagactgttctcacaacttratcacactcagttgtttactgtggccaagctagaacaaaaggttttgttt

SEQ ID NO: 2436 - DNA, 101 bp, Homo sapiens
tattgtgagcacttatcatgcataagacactgtcaattcaaagataaaatkgccaatccatccttgaataactcacagcacttgtttttacttttgaaaag

SEQ ID NO: 2437 - DNA, 101 bp, Homo sapiens
tgtgaccatgaaatttggaagccaagcataggataccaggagaggttggayagaagcaagatttatcagaattagccttggaatctctgactcaagtatgg

SEQ ID NO: 2438 - DNA, 101 bp, Homo sapiens
aaactagatttaaaaatagacaaatgtcttggtccacataacttatatggyttcgtgcacaattgaatccagtggctaaagtaaaccattaggattttctt

SEQ ID NO: 2439 - DNA, 101 bp, Homo sapiens
tcatgcttttaatattatccagactatatagatacagaggattgtagttayggtttaatcatcttctgtttctttaaacttgatagaagttcttcactggt

SEQ ID NO: 2440 - DNA, 101 bp, Homo sapiens
tctataaatatcttttaatatattgagtgttgagccctctgacatatccarctcttaactctctctgtgagaagtaggtatatattttaaaaagagaacat

SEQ ID NO: 2441 - DNA, 101 bp, Homo sapiens
ttggccggtaaaaagtagaccctggtacatgtgtagatacaactcagtatygtaaaatggaatacacttgttggtctaacaccagccacacatttaatatg

SEQ ID NO: 2442 - DNA, 101 bp, Homo sapiens
cctaaaagaatttgactctaaagtctcttggcttctgttttgctgtcctasgcttctttgaaaacagacaataacaacaaaacttatacttccacctgcca

SEQ ID NO: 2443 - DNA, 101 bp, Homo sapiens
tcaagatcacatcgagattttcttgcttgaacaactgggtaatagttggtsgtgtttactcagatgaggagatagaattaggaagggcagaagggcagtgc

SEQ ID NO: 2444 - DNA, 101 bp, Homo sapiens
aatggcaaaactcgacacggtatcatatgttggcaatcaaaagatctcctygacccagtttatctttggcaaatatctctctgtacgtgtctctcataaac

SEQ ID NO: 2445 - DNA, 101 bp, Homo sapiens
gagaggttcatttttttttagaatcaataaacaattaaccctaccacaatrataatagtactatgattcagccatttctcctacaaaccattagtgatttc

SEQ ID NO: 2446 - DNA, 101 bp, Homo sapiens
cgaaagcaaatcgttgaagctgtgtaaaattttcaaacatttaggtagagwtattggcatgcagtttacagacagaaaattttttaagagggaaaagaaac

SEQ ID NO: 2447 - DNA, 101 bp, Homo sapiens
atatataatagatatttattaaataagaacttagtgagtttcataattctsttacaaaatattactattatacttcacatttaatttggctttataatata

SEQ ID NO: 2448 - DNA, 101 bp, Homo sapiens
aaaagctgagaacttctgcccagtcagcagtcctctggagtctacagaacygagagtggggaagagggccaatgggaggggaacagggataagggtctggt

SEQ ID NO: 2449 - DNA, 101 bp, Homo sapiens
tttaaaatgagttttttctcaattgggtcaaatatacaggaaacggattaygaaatgttatcaattacgtccaccttctaggtcaacagaaacttcaaggc

SEQ ID NO: 2450 - DNA, 101 bp, Homo sapiens
ctgaacctattcttctcatccacaaaaccctgtcccagaggattatgagaygaagatagtttatataagcactgaaatgtaagctttatgagggcaaagat

SEQ ID NO: 2451 - DNA, 101 bp, Homo sapiens
ccaagaacatcttactacaaaagggacaattcaggtcctcagaacagatcrcaggtatgggacgtgtgataactatgtgattaggactgagattgttaatt

SEQ ID NO: 2452 - DNA, 101 bp, Homo sapiens
aaagtgttttaacacggtagatttctgttgtgtacattttatcactcaaaraacctcagccgtgggtcgggcgcagtggctaacatgctgaaaccctgttt

SEQ ID NO: 2453 - DNA, 101 bp, Homo sapiens
cccctgagtatctgagtcccttcatgagcttgtctagctctttctctgttkaatggctgtatctctcagatagacttatctggccttctagttctgagatt

SEQ ID NO: 2454 - DNA, 101 bp, Homo sapiens
gaaataagcatgcaatgcatgcttaataattcctttcagccttaactttcmttcttagattaatgaccctagctgagaacttttcagcagagaatattttc

SEQ ID NO: 2455 - DNA, 101 bp, Homo sapiens
acctaaatttttagagtttccattggagaggcagtaactccagtgacagcratgagtttctctctgtgaaaaattttgaagtccccaactgtttgataaag

SEQ ID NO: 2456 - DNA, 101 bp, Homo sapiens
gctttaattgaaagctgtgtgtttcaatgggctcacgtggcatgccatgaycagttattccaaacgacttgggctgcatgatgctctgtttcttgtcagtt

SEQ ID NO: 2457 - DNA, 101 bp, Homo sapiens
gagtgggttggaggaagctcaatgctctgagcattcagcatttttggcaaygaatcttgtgattgccagaatgaggaactccatccagttgcttaaaccat

SEQ ID NO: 2458 - DNA, 101 bp, Homo sapiens
cttgtagaatgaaatatttacaagatttgctatttgttaacattttagctmcttccttgttccttcagtcttgctgctgtgcacaccaccataccaggaat

SEQ ID NO: 2459 - DNA, 101 bp, Homo sapiens
tgtccttcttggatctaaagcaaaagctcatttttggtaggaagcagctcktagggttctagctctagccatgggtatatgcatgcctttggagatgtttc

SEQ ID NO: 2460 - DNA, 101 bp, Homo sapiens
acaatgaatcatctatcctattgacgtgggcaccagccctgagaggaacgratgaacttgattgacctacccggaatctaagtgatgatgacccaaagagc

SEQ ID NO: 2461 - DNA, 101 bp, Homo sapiens
agaaaatagaggctaagaaaattatgcaatgtgcccaagttacttcactgsaggatcaggaattaggtctaatttgttataaaatgatgctgcagctacag

SEQ ID NO: 2462 - DNA, 101 bp, Homo sapiens
gagggggggaggcaggcagggcatacagagggtttggtgtcctactgtgamgattttgccttttaatcagcctgaaatgggatataaagtcttagatggat

SEQ ID NO: 2463 - DNA, 101 bp, Homo sapiens
gctggagcagggaggtaatcaagtctgcgggacacgtagcccattctttastggacatcatggtagggacgttctcatgtggagtaagtgccaaatcactg

SEQ ID NO: 2464 - DNA, 101 bp, Homo sapiens
ttagttcatctgtgaaatggggcaataacctctctttctacttattttggragacatcttagaaaaatatcaagtgtcgtggcagatgtaagccacatgac

SEQ ID NO: 2465 - DNA, 101 bp, Homo sapiens
tctccaggtggttttcttctcttattgacttctcttcaaacaaggagatamttattcagtcttctagaatttccttgcttatagccatttacttccatact

SEQ ID NO: 2466 - DNA, 101 bp, Homo sapiens
gtaagatgatagccttttgtatttaatttcagcccgataaatcatcccatygtgcaactttagtttcaatgttttgcgcctctagagcagagagagagaga

SEQ ID NO: 2467 - DNA, 101 bp, Homo sapiens
tgaaccatgaagcctggcctattattgcttttagttattcatattattgcrtagcccaaccagctctctgcttccctgggaaaagatttgacagtgggagg

SEQ ID NO: 2468 - DNA, 101 bp, Homo sapiens
caaagcgagaaaggccccctgggacccgactcaacaacaactccctagcaraaggagcctcgccctccctggcgccctccctcaccctccctggctgactg

SEQ ID NO: 2469 - DNA, 101 bp, Homo sapiens
acgggcccgacactgcctatgagaagcagaggctcacctgtcctcctgggygtctttcggcagccatggtcagaacacatacctggctctgttttagggag

SEQ ID NO: 2470 - DNA, 101 bp, Homo sapiens
gttgtatggtatttccaagagtcatgcctataatataatgacagagtaacrttggaaataaagatgacagattgaacatgcatctgattttctctccttcc

SEQ ID NO: 2471 - DNA, 101 bp, Homo sapiens
agccaggaagcctgttattagatggaaaaaaaaaaacaggcttaatcgctyggaatacagaatgtaaaatgggatttccctggtgtagagaaaaggacaat

SEQ ID NO: 2472 - DNA, 101 bp, Homo sapiens
tccaatatgtaatcaaactagaaacacccaccatcaccaacaagagacccrgtgttccaattttatgagaaagcatggctttcttttgcatttactaagaa

SEQ ID NO: 2473 - DNA, 101 bp, Homo sapiens
cttgatgtttgtaaggatttttgcaggtcacatgctaaagagggtcccacrcttcatagaattttgggcggctagaaggatctgttatttgtacgtgttct

SEQ ID NO: 2474 - DNA, 101 bp, Homo sapiens
tccttatttgcagagtcctatttgagttggcgttgtgcacgtgacctatgsctgacctgcttggattaggacgccagcctaggttagccccatggcagagg

SEQ ID NO: 2475 - DNA, 101 bp, Homo sapiens
gaaagacttctcggtcattgctgtcacctggaattaactgagcaaaatttstctagctacgatgaagcagtccaaaagaagtagaaaatagagatcctgct

SEQ ID NO: 2476 - DNA, 101 bp, Homo sapiens
caacaatacactaatcttttccataaatgataataactgtagttctacgtrctaggagccaaccccatccaatcacttcagcactcttttttttttttttt

SEQ ID NO: 2477 - DNA, 101 bp, Homo sapiens
agcaggacagagtttaaattaaaaggtcttggagtacaaaacaatttattygaatgtaaaaggcaaaagtgagtcaggtctcttgacctattccaacaata

SEQ ID NO: 2478 - DNA, 101 bp, Homo sapiens
tcacctaaagccccgatcctgatgaagacatttggatctggcccaagcacytcatattgtactgaagcacagggtggtgatgggtttttttgcctcttggt

SEQ ID NO: 2479 - DNA, 101 bp, Homo sapiens
caactgaatctctagaaaattgcattagcagaatgttttcatattctgctrtaaattaaacagtacagaggggcacctttattttctttcatttccttctt

SEQ ID NO: 2480 - DNA, 101 bp, Homo sapiens
tgacatatttctaactccacgttctgtggtagtggcttcatcaccaattcrtaagtataccagaataagggaaactattttctcaacggatttttttctta

SEQ ID NO: 2481 - DNA, 101 bp, Homo sapiens
cttaagctaggcttccagtaaacttatgtctgagtcaggttgcaatcttcrtgaggactcgtgtacagaggcatcttcaggtcaaatttagtttaatttaa

SEQ ID NO: 2482 - DNA, 101 bp, Homo sapiens
agtgctggtttcttttcactttttcctgtgttctgtaaagttggcttcacstttgggctggctttcctcatgggaccaagatggctgcctgcagtccctga

SEQ ID NO: 2483 - DNA, 101 bp, Homo sapiens
ccttattaaatttctggctggtcagtcactcaccttaaactgagaaacacracctaagtctagaaaagctgcaggtttttacagtctattccaaaccaaag

SEQ ID NO: 2484 - DNA, 101 bp, Homo sapiens
aagcccaggaaggaacacactcacatacacatgaacacccatgtacatccrtttcaagtcccatgtactggaaggtttgcaaccttttcaattaacccctt

SEQ ID NO: 2485 - DNA, 101 bp, Homo sapiens
ttactcttcctcctctttgtcctgttttgaagtggaatacagtaactaaayagaattaaaatgtggggaaaataacacaaaccctgtggcagtatctgggt

SEQ ID NO: 2486 - DNA, 101 bp, Homo sapiens
aggattttttcttttaactggtgaaaataactgtgacctgaattgagaatraaccaggctccaaaaaggcagttttcctgaacatgtacagacaaaggaaa

SEQ ID NO: 2487 - DNA, 101 bp, Homo sapiens
tagaatttaggcaacatctataacttttcctccatggagctacaacttacsatatcttccttcccccattctctgataaccaccattctattgcctacttc

SEQ ID NO: 2488 - DNA, 101 bp, Homo sapiens
gtgtgtgtgtgtgttagaaaaagggtcaaggagtatcatccaggaataaamagatttagagtcagacctgcatttgtttgggtttgtccctgtatagtagg

SEQ ID NO: 2489 - DNA, 101 bp, Homo sapiens
atgtcttctcctgatgctgttttaaaatacaaaaactgacttagcaaaatmcctgggtaccaagtttcttggcctaactcctaagggtggtagatgactag

SEQ ID NO: 2490 - DNA, 101 bp, Homo sapiens
agaagaaactgagcatatttcccagccgttttctctcttcctgctcttgaraattaacagtccataggaagcaaacattttgccctgcttctccacacccc

SEQ ID NO: 2491 - DNA, 101 bp, Homo sapiens
aaattagcctaattagattttcagagcacttagataccacagtgatagacrccatctaaatacatagacagataggaagagagcacagatgttgtgtgaga

SEQ ID NO: 2492 - DNA, 101 bp, Homo sapiens
gagtttccttatatgcaaatgaaaaaataataaaacctacatcttagagtygatatgaaaagtaagtgagaattatataaaagtgcttggtaccatgccta

SEQ ID NO: 2493 - DNA, 101 bp, Homo sapiens
tctattctagaaagttccttcttgctgtggttgaagattgggaatttttaygtacctgtgtggtagcacatagccctttctgaagcctgttttgtgggggc

SEQ ID NO: 2494 - DNA, 101 bp, Homo sapiens
gaatgatagtttcttgtttagaataagggagaaagtcttgaatagacttakaatatgacccagtgaagaaattttaagtatgctaacattccaagtggact

SEQ ID NO: 2495 - DNA, 101 bp, Homo sapiens
aagatgataaagaagattcaacatgcctttttaataaaagatttttctatrcgcttaaatttggactggatctgaagattgtaatcacaagctataaacac

SEQ ID NO: 2496 - DNA, 101 bp, Homo sapiens
atctcaatgcagaaacaatatttaagtacatcagtgcaactcttgggtatrtgtaggatttaatagcagatgaagccaaatgagctgaaatggaaaattta

SEQ ID NO: 2497 - DNA, 101 bp, Homo sapiens
agacccctagcagagagaaagagaggctggcaggtggaggaggtgtcacaygttttggtaaactccaagaggggagggtctgtattggctttgtttgcctc

SEQ ID NO: 2498 - DNA, 101 bp, Homo sapiens
atgacaataataaccacaaaactcagaaactagagtagggagaaagagatwtgtcttcaatgaatgtagcacttagagaaaaagaccagagtactaatatt

SEQ ID NO: 2499 - DNA, 101 bp, Homo sapiens
aattttcacattgccaagtgctagatgttattatgttccttgaatgagtayagggctttattttagtgcttatgttattggaggatcagttgggtcacttt

SEQ ID NO: 2500 - DNA, 101 bp, Homo sapiens
aacacagagaaccacaagatcttgtggaatttcatttctgtgttacatagmattgcattttgaagtagtgtttattgttttccttttatttttatctcatg

SEQ ID NO: 2501 - DNA, 101 bp, Homo sapiens
gagtgtgtgttgagctgtatgtatcaaaggcagggatttttaatctggagwtcatacactggcctctgatgtgtcagtgaatccctgtggccaaaatacgt

SEQ ID NO: 2502 - DNA, 101 bp, Homo sapiens
gggcagggctgagaaggtagggttggaaatgtcaggaagccattcttgagstaagtaagaagtagtaagttcatggagaaactgctgaggcccatgggtag

SEQ ID NO: 2503 - DNA, 101 bp, Homo sapiens
tttacacaatttataaatcaaatgttattggtttaagttaaagagagaagktgtctaattgagattatgaggaatataccatttttttcaggaaggtaggg

SEQ ID NO: 2504 - DNA, 101 bp, Homo sapiens
tttccattgtttggtgttagggttttgtttttacctttatgtgtacttaaygttaattgtgaaatctaagcaggacattattcttagttcttttatcctga

SEQ ID NO: 2505 - DNA, 101 bp, Homo sapiens
caataatgtacaaaaactgtctttattttaaagtgaatttaatctgaaatrgtttactatagtttgaccaatctctctctgacttactgttcaacttaatc

SEQ ID NO: 2506 - DNA, 101 bp, Homo sapiens
tcagttgatttcataatgctgatatttctgtaacaatcaggtttacagcaycagattagctacatggtgcttatagtatcattttagttaaaatagaattt

SEQ ID NO: 2507 - DNA, 101 bp, Homo sapiens
aaagtggctatggctgaactgttagaaactttaaaatcatttagcaagaamatccttctactccatttctcatgttatttgtaaatatatataacataaca

SEQ ID NO: 2508 - DNA, 101 bp, Homo sapiens
tggcatgaaattttaatgctacgacttattaaggaaaagaaaacaaattaygtgatgtgttatccccctttatccaatatcattagagaaagagctactcc

SEQ ID NO: 2509 - DNA, 101 bp, Homo sapiens
cagttaggagtttattgcaaaacagcaagtgagaacctcagaggcccggawaaaggccatgtttgtgagaatgctgagccatcagaagcgctggccaaccc

SEQ ID NO: 2510 - DNA, 101 bp, Homo sapiens
agatattatttggggaaattggggattcgaaactggtgtgaaggagctatygtgtaacattttatttgcctctctaaaagtcagtaatgatagttttcaat

SEQ ID NO: 2511 - DNA, 101 bp, Homo sapiens
gtctgtgtttaaaattcagatttgaattgctgactgctaatttaaaatgcmagttcttagcctcatttcgcatatacaaaatcataatctccatgtatgaa

SEQ ID NO: 2512 - DNA, 101 bp, Homo sapiens
attgtggtaggctaatatgattccttccctcaataagatgactttcctctrtggattttgtagatttggcacctttctgtgacatcctatgggggtagttg

SEQ ID NO: 2513 - DNA, 101 bp, Homo sapiens
atctagaatgcatgtatttcttactgagtagaggcaaacataaaggtagarcatgatataatgattcttttttttatacactttaagttttagggtacatg

SEQ ID NO: 2514 - DNA, 101 bp, Homo sapiens
acagatgaagaatctaaaaaacagaaggctaagttagagtcacacagatgrttaaactatgagcatcaactagaaggcaggtttttatttgtttttcatct

SEQ ID NO: 2515 - DNA, 101 bp, Homo sapiens
cctaaggataatttagccctactattatggattgactgttctgaggttccyactaaatacatttgttgttcaacatgattttttaactttgcctgctcaaa

SEQ ID NO: 2516 - DNA, 101 bp, Homo sapiens
aggagacaaatgagagaggttgaatatatggtttaggtcagatttagtttktatagaagagccaaatgaaatatattaagggagaatgtcggtaccacagt

SEQ ID NO: 2517 - DNA, 101 bp, Homo sapiens
agttagaagtcaaaagattgattccctttgacaggtagagaagactggcaygatgcgtaaggggatttctgaggtgcagataaacttttgattcttgatct

SEQ ID NO: 2518 - DNA, 101 bp, Homo sapiens
gagataaaggaaaagacattgaactgcttagaaggttgaagggagatcaayatgaaatgaacagaatctattcatatactgtccatagggctcagagggtt

SEQ ID NO: 2519 - DNA, 101 bp, Homo sapiens
atatactgtaaatgttcgtgaaatggattctgtcttctgtttttgtcaagrtgtttgagaccaacttaatgctctttctcttagaagcaggtcggcagtca

SEQ ID NO: 2520 - DNA, 101 bp, Homo sapiens
ctattcttcttctctataattacttcctttgcctgatcttcagccatactwttttctccatgctccaccattaaccttcttttattgtgcctggtttatgc

SEQ ID NO: 2521 - DNA, 101 bp, Homo sapiens
tattatttgctttttatttttttatttcttaacaaccaccgtatgtccaayagattaactgacttttaaaatcagacatattgaaatgttattccttccag

SEQ ID NO: 2522 - DNA, 101 bp, Homo sapiens
actaatctgtcctatgtcaaaatgagtactcatacctttgctcgagtccayagccgagtgagaaatggccaagctgcaaaggcagtaagtccagcggtaag

SEQ ID NO: 2523 - DNA, 101 bp, Homo sapiens
cctgtggtgcaggtggcagaggggccaggagagggtgaacgcaattatgaraaaaggttaaaattgtcatactaggtaaagggtatacagatgttcatcaa

SEQ ID NO: 2524 - DNA, 101 bp, Homo sapiens
tttgcttttgtgttttctctctttctcttggttgttccttccttcttcccrtggcgcactgtgtttgctctttccgtgcatcacctgtgaataccccctgt

SEQ ID NO: 2525 - DNA, 101 bp, Homo sapiens
acaacaacaaaataaggtgtattggacaagcttgctagatgttctattgtmagctgagctggatgttgcagttttgaataatccttcaaatcaggtctagt

SEQ ID NO: 2526 - DNA, 101 bp, Homo sapiens
caacaggcaatgggtctttggtgtgtgccatgttgtcaagttaaatgggtrtttgatatgttgtcatgttaaacgggtctttggtgtgtgcagtgttgttg

SEQ ID NO: 2527 - DNA, 101 bp, Homo sapiens
gcttgatcagtattctgtttctgttcagtactatgataaattagcaatctytagaggtcatttagattgtgtttattccctacagagcaggttggtgaaaa

SEQ ID NO: 2528 - DNA, 101 bp, Homo sapiens
tcacaatactatgtcaatatattattgctctattgtggtttgattttaaaktccttgattcatattctgttacattatttgatttacttttcattttgctg

SEQ ID NO: 2529 - DNA, 101 bp, Homo sapiens
aaattaaacaacttacccttaaataacccaagaaatggaatctgttataawtgaaaagagaaggagtgtctagaagtcagtagattttaatagttaaggaa

SEQ ID NO: 2530 - DNA, 101 bp, Homo sapiens
cttttaaaattttgttgcatatgatttgctattattttctttaggatctaygtgtcaaagttaatatacaacactggtaagattcagccttttcaaggaac

SEQ ID NO: 2531 - DNA, 101 bp, Homo sapiens
atgaagacaactgttttattgtatttagggaagtatgacaagaaaaaacawctgtacatattcagtacagacacaaccaccatacggctacctacctagta

SEQ ID NO: 2532 - DNA, 101 bp, Homo sapiens
agagtttaatttgtaatttaagcatgtgatttaatatagctagattgatcyctattggctggggtggacatagctttgtgacattaccagattcattttta

SEQ ID NO: 2533 - DNA, 101 bp, Homo sapiens
agagctactgttacagggctgagacctagaggaaagtggaggaaaccgatrataaaatgataattatatattcagaatatcccaatgcaaagcttactctt

SEQ ID NO: 2534 - DNA, 101 bp, Homo sapiens
gcttaaccaataacccactggtcttcgattgcattgctcattgcctttttstgtataggttctctagacacctccatggaagaaaacctcattgcttaagg

SEQ ID NO: 2535 - DNA, 101 bp, Homo sapiens
gtagtgctttcttcagttgcatgttgatctactgttatatacaagaatgarttacaagtcatatgccatcagctttgcattttgcaagaattttcacaaat

SEQ ID NO: 2536 - DNA, 101 bp, Homo sapiens
tatgacacctttgtactaaacacattgcctttaggcagtcttattcttcayccagtaaacagcagaccatggatttgattgttttctttcttttcttttct

SEQ ID NO: 2537 - DNA, 101 bp, Homo sapiens
acctccactcatcagcagtttaggatgacttcgatctggcaaaacctaatsaagacagaaaagacattcatgctttcctaagacaataaagtccatgctaa

SEQ ID NO: 2538 - DNA, 101 bp, Homo sapiens
tctgcatcttaattgctgtgtcagttacaggactaggtgcatttgtcaaawtaaggtaaataaattacatctcaataaactcgactcacacccaccaaaaa

SEQ ID NO: 2539 - DNA, 101 bp, Homo sapiens
aaaaaaaatctgtcaactcctaatccctatgtatctgcttctgattgctaraagaatggcttagaaacaagttgtcacgaagaatttttttttttaagttt

SEQ ID NO: 2540 - DNA, 101 bp, Homo sapiens
atgtctaatccagtcacatcttaaggttatagctcaccgacacatatttakcgtttcccaaatattcagagttctctgtaatccacaacttgtctcatact

SEQ ID NO: 2541 - DNA, 101 bp, Homo sapiens
atttacagataacagagtatataaactaccagcacatttctaagaactgargtaattatctgggatgggaattctattctgagtttattgcatactctaat

SEQ ID NO: 2542 - DNA, 101 bp, Homo sapiens
gtctgaccctttatccaacatccagcttaaattcctccaattccattaagrctgccatgtgaaacttagcagagcttagagtgatttctccatccagttaa

SEQ ID NO: 2543 - DNA, 101 bp, Homo sapiens
atattaccaaagtcatcctccattacactaccatttgctcccacattcaasgcaacgatgtcatttccagatgaaactatttgtccttgttaaaacagaca

SEQ ID NO: 2544 - DNA, 101 bp, Homo sapiens
ctgttctactttctcattataaacagtagaattcactattaatagtaaagkcttccacaggagcagaaaaaagcatatatcattttacagacatacagttg

SEQ ID NO: 2545 - DNA, 101 bp, Homo sapiens
cactataatacaaaaaagcagaagaaaacacattttccaatacagtagacrtaacttaaaaatattcaagtatctcatgagatctgtggtatatttatgta

SEQ ID NO: 2546 - DNA, 101 bp, Homo sapiens
cctcaattctaaaatgaggttaataatggtataattattgaggttttttartatgaggttaataatgtaaaatgaggttaataatgaggttcatataggta

SEQ ID NO: 2547 - DNA, 101 bp, Homo sapiens
cacgcaatccgagctttatgcaccagatcgttactctgctgtgaaaatgartattgggtttatggagaaagctaaacggttgggaaggtgtgtccctagcc

SEQ ID NO: 2548 - DNA, 101 bp, Homo sapiens
gttaggaaacttgttgaatcgatatgcaggtcttctctctgtttaggtctyatttacccatcacacatatatttatcaaatatattcttaaggtttccttc

SEQ ID NO: 2549 - DNA, 101 bp, Homo sapiens
ggttggaccaaggcatcccaacttcaggtttcacccacgtagccaacagcragaattacatcctaccaatgtttagagactttcttcctgtgcatcttcag

SEQ ID NO: 2550 - DNA, 101 bp, Homo sapiens
cctctgtgtcatctgatttaatggagattccagttagtggcagcttatccrgttactttagagactgattaatgagttgtcactgttttattggatatcgg

SEQ ID NO: 2551 - DNA, 101 bp, Homo sapiens
cagagacttgaatttcaagacagacctggcctttcttttcatattcaaatrctctgcttggttccgcattgccaagcttgtaaggagtcatgaggatcagc

SEQ ID NO: 2552 - DNA, 101 bp, Homo sapiens
tgacttgcagctctagaaaccaggtgttggcctgcgtccaggtcttagagytcagagacttgaatttcaagacagacctggcctttcttttcatattcaaa

SEQ ID NO: 2553 - DNA, 101 bp, Homo sapiens
agcaaataaaacaaggtaacttcccacaagattatctaactaataattaawcaaaaatgtcaactaatagactggtacctgacagactggcaaaaattcaa

SEQ ID NO: 2554 - DNA, 101 bp, Homo sapiens
acatgaggctttcagttctcctgcccaagtatttcccggggaaatcactcygacaaataagctttcctgggggcaactggcatcctctttcagctctaaat

SEQ ID NO: 2555 - DNA, 101 bp, Homo sapiens
gctgaccactcagccagccctgaatgaatgagtctggcacctgtgaagatraggaatagatatctctgaatagatattggtgaccgaacacagcccagctt

SEQ ID NO: 2556 - DNA, 101 bp, Homo sapiens
atgaatgcccccgtcctatgcaggtgaattaaaaagcaaggcacaaactgrtgttatggtatttatcattgttaaggttttataaatgtgcattattgcgc

SEQ ID NO: 2557 - DNA, 101 bp, Homo sapiens
aaggctattttgtgagtattatttagttagcccctgccctgggttgtaaargtgcagagatgagtcgggcaccgctgtgccatggggagtttgtgctctaa

SEQ ID NO: 2558 - DNA, 101 bp, Homo sapiens
tgttagatcccaggaattcattaataatcatccttggctttccttttaaasgctattttgaaatggtcttttcactttcattcagtcatcaccccccaaaa

SEQ ID NO: 2559 - DNA, 101 bp, Homo sapiens
tgggattggatcctgcaacagataaagggtattgttggggtgaacagaccsaacaccaggtcgtgggggtgacaaagtccagcggagtcaaaggattgaga

SEQ ID NO: 2560 - DNA, 101 bp, Homo sapiens
atcaaatccaaatatgttgtttagtttgagatgtcaaaatattggagtgcrtgaagactacagacaataaaaacttaaatgaaaggattaggaggccaaaa

SEQ ID NO: 2561 - DNA, 101 bp, Homo sapiens
aagattttacactttcttttctggtttaggatttgaagacatctgttctcrgtaatttttagactattaattttgttgaaaaaattaaaggatggttctgg

SEQ ID NO: 2562 - DNA, 101 bp, Homo sapiens
aaagtttcttgcatctttttctttgccatttatcaaattatttctagagcrtgtatttgccacacatcaacttgtatattaaagtctatgctgcatttttt

SEQ ID NO: 2563 - DNA, 101 bp, Homo sapiens
aatattagtgcaggaaactagattctatagagaattcatttctgttgccgygttaaagaaaaattcatgattgtttataatttttggaagaaccgtgttaa

SEQ ID NO: 2564 - DNA, 101 bp, Homo sapiens
tgcataaaacaagagcctgacttgtgtgaaaaagtgataagaagatattcrgtagagatctgcggggaagtctcagagcagaggtccagaataagttaagt

SEQ ID NO: 2565 - DNA, 101 bp, Homo sapiens
cagctgtgaaaatgtttgtccatttgtgaaacttcagaaagcgggtctagsaaatcattctcacctggtgattctggggcaaggtgagaactgtaccctca

SEQ ID NO: 2566 - DNA, 101 bp, Homo sapiens
tggttaatggcatctattatgtggaaggcattgttttacatattaatatayagcatgaacaagaacgacatatctatttgtacagactgcattttagaatc

SEQ ID NO: 2567 - DNA, 101 bp, Homo sapiens
tttcttctgagtttaaaagcatgcatgaagctgcccctgaatttatcttgscaagtggaatccaagtggagacacgttcttgtatgcaattatctaattca

SEQ ID NO: 2568 - DNA, 101 bp, Homo sapiens
cctgctgtctttcagagactctgaggcctcacgagcattgtctaagccatyggtgttctcactgtcagggccagagtgaatgctgcagggctgtcacttgt

SEQ ID NO: 2569 - DNA, 101 bp, Homo sapiens
tagagatagcacgtggttatcctctccagaaaatctgggctgtgtttggayctattctaagcatctccctctttctccacctgcagggctcccctgaaact

SEQ ID NO: 2570 - DNA, 101 bp, Homo sapiens
tcaatgtgttttcagactagatgtaactaatgtattggatagaaaaacttyttaagatcaatattgtttccttgagcttttctgcctgttcaccttggtct

SEQ ID NO: 2571 - DNA, 101 bp, Homo sapiens
tctgattgtctttgtggttgaaactttgacatgtggaagaactctgtttcragaggaagcatttagagaagaagactgaggcatgactagatagaagattt

SEQ ID NO: 2572 - DNA, 101 bp, Homo sapiens
tgttggtggtgttatttacaactttgtcagcctctgctcttccaagcaacrttcttttgggttcatgtaattctttgttggtttttctttttggctatgaa

SEQ ID NO: 2573 - DNA, 101 bp, Homo sapiens
tatgtgcttcctctccagcagagcctgcagacttcactcttaatgagcaaygcttctgctccctctggtttccttaactgctcccttgttccaggctgaga

SEQ ID NO: 2574 - DNA, 101 bp, Homo sapiens
ctttagaattttatgttttaaaggaaagatctaagggtctgatgaaaggasttgtatttcctcggatcttttcttccactttataaaataaaaaccatttt

SEQ ID NO: 2575 - DNA, 101 bp, Homo sapiens
ataataaggcgtgtaggcagcctctagaagctggaaatgtcaagcaaaccstttctctcctagagcctccagaaggaagccagccctgctgacaccttgat

SEQ ID NO: 2576 - DNA, 101 bp, Homo sapiens
ttcaaggcttatgatagtttttccacatgtaaccagagatacatatagacrgttctgatccaaattgttttggacattcttttagatctccaggaatgaat

SEQ ID NO: 2577 - DNA, 101 bp, Homo sapiens
caaacaggaggctgaccttgtccataatctctgtttttaaaaagtcattaytagtgcaattccaatctcagtaagaaatctttactttcttatacattggc

SEQ ID NO: 2578 - DNA, 101 bp, Homo sapiens
tactttgtggtaagaaacccaccccctatatggctttaggatgcttcactrtgaaatgttaaatttgtgtgtctgtttcaagaccactgtactcaattttt

SEQ ID NO: 2579 - DNA, 101 bp, Homo sapiens
cagaaagttttcttgttgagatttcagcttgtctgtatgctttggagtggygaggttaaagtgatcttacttgactggtagtggtcaactggcaaagttct

SEQ ID NO: 2580 - DNA, 101 bp, Homo sapiens
tgtgatttgttattacaaatggttaaattgtagaggcttctttgtggtttyagtaatggaaaaggacagcagctcccatgaggtaattttatcttccttgt

SEQ ID NO: 2581 - DNA, 101 bp, Homo sapiens
tgtacatcattagggaaataggtgacatctatttctattgacttgacaaamaggtagttttatgagtccttttggcatcatattttatatgcaaaaatgtt

SEQ ID NO: 2582 - DNA, 101 bp, Homo sapiens
ggttcatatataaaagatgttcagttgtaatgacacttagaattcagggakgttctatattagtaaagttgaaaaaattagattgattgagacttcggatg

SEQ ID NO: 2583 - DNA, 101 bp, Homo sapiens
aggttgctaaggcaataaagtaggtaaacagtacaatgcctcgcactttgyaaatattcaataaatgttagggtacttttttctttccttcatacttgtac

SEQ ID NO: 2584 - DNA, 101 bp, Homo sapiens
agtggtcctagattcagagatctgtgttctgctgtcaggctgtagtattcwtatatgtcaaatggggataatcatccctgtcctaccttcttgcctcatac
